United States Patent Application Publication US 2026/0109938 A1 - sequence listing, part 9

SEQ ID NO: 5 - DNA, 3977487 bp, Escherichia coli (residues 1-1,988,744 of 3,977,487)
  source 1..3977487: mol_type = genomic DNA
agcttttcattctgactgcaacgggcaatatgtctctgtgtggattaaaaaaagagtgtctgatagcagcttctgaactggttacctgccgtgagtaaattaaaattttattgacttaggtcactaaatactttaaccaatataggcatagcgcacagacagataaaaattacagagtacacaacatccatgaaacgcattagcaccaccattaccaccaccatcaccattaccacaggtaacggtgcgggctgacgcgtacaggaaacacagaaaaaagcccgcacctgacagtgcgggcttttttttttcgaccaaaggtaacgaggtaacaaccatgcgagtgttgaagttcggcggtacaagtgtggcaaatgcagaacgttttctgcgtgttgccgatattctggaaagcaatgccaggcaggggcaggtggccaccgtcctctctgcccccgccaaaatcaccaaccacctggtggcgatgattgaaaaaaccattagcggccaggatgctttacccaatatcagcgatgccgaacgtatttttgccgaacttttgacgggactcgccgccgcccagccggggttcccgctggcgcaattgaaaactttcgtcgatcaggaatttgcccaaataaaacatgtcctgcatggcattagtttgttggggcagtgcccggatagcatcaacgctgcgctgatttgccgtggcgagaaaatgagcatcgccattatggccggcgtattagaagcgcgcggtcacaacgttactgttatcgatccggtcgaaaaactgctggcagtggggcattacctcgaatctaccgtcgatattgctgagtccacccgccgtattgcggcaagccgcattccggctgatcacatggtgctgatggcaggtttcaccgccggtaatgaaaaaggcgaactggtggtgcttggacgcaacggttccgactactctgctgcggtgctggctgcctgtttacgcgccgattgttgcgagatttggacggacgttgacggggtctatacctgcgacccgcgtcaggtgcccgatgcgaggttgttgaagagcatgtcctaccaggaagcgatggagctttcctacttcggcgctaaagttcttcacccccgcaccattacccccatcgcccagttccagatcccttgcctgattaaaaataccggaaatcctcaagcaccaggtacgctcattggtgccagccgtgatgaagacgaattaccggtcaagggcatttccaatctgaataacatggcaatgttcagcgtttctggtccggggatgaaagggatggtcggcatggcggcgcgcgtctttgcagcgatgagtcgcgcccgtatttccgtggtgctgattacgcaaagttcttccgaatacagcatcagtttctgcgttccacaaagcgactgtgtgcgagctgaacgggcaatgcaggaagagttctacctggaactgaaagaaggcttactggagccgctggcagtgacggaacggctggccattatcagcgtggtaggtgatggtatgcgcaccttgcgtgggatcagcgcgaaattctttgccgcactggcccgcgccaatatcaacattgtcgccattgctcagggatcttctgaacgcagtatctctgtcgtggtaaataacgatgatgcgaccactggcgtgcgcgttactcatcagatgctgttcaataccgatcaggttatcgaagtgtttgtgattggcgtcggtggcgttggcggtgcgctgctggagcaactgaagcgtcagcaaagctggctgaagaataaacatatcgacttacgtgtctgcggtgttgccaacagcaaggctctgctcaccaatgtacatggccttaatctggaaaactggcaggaagaactggcgcaagccaaagagccgtttaatctcgggcgcttaattcgcctcgtgaaagaatatcatctgctgaacccggtcattgttgactgcacttccagccaggcagtggcggatcaatatgccgacttcctgcgcgaaggtttccacgttgtcacgccgaacaaaaaggccaacaccagcagcatggattactaccatcagttgcgttatgcggcggaaaaaagccggcgtaaattcctctatgacaccaacgttggggctggattaccggttattgagaacctgcaaaatctgctcaatgcaggtgatgaattgatgaagttctccggcattctttctggtagcctttcttatatcttcggcaagttagacgaaggcatgagtttctccgaggcgaccacgctggcgcgggaaatgggttataccgaaccggacccgcgagatgatctttctggtatggatgtggcgcgtaaactattgattctcgctcgtgaaacgggacgtgaactggagctggcggatattgaaattgaacctgtgctgcccgcagagtttaacgccgagggtgatgttgccgcttttatggcgaatctgagtcaactcgacgatctctttgccgcgcgcgtggcgaaggcccgtgatgaaggaaaagttttgcgctatgttggcaatattgatgaagatggcgtctgccgcgtgaagattgccgaagtggatggtaatgatccgctgttcaaagtgaaaaatggcgaaaacgccctggccttctatagccactattatcagccgctgccgttggtactgcgcggatatggtgcgggcaatgacgttacagctgccggtgtctttgctgatctgctacgtaccctcagttggaagttaggagtctgacatggttaaagtttatgccccggcttccagtgccaatatgagcgtcgggtttgatgtgctcggggcggcggtgacacctgttgatggtgcattgctcggagatgtagtcacggttgaggcggcagagacattcagtctcaacaacctcggacgctttgccgataagctgccgagtgaaccacgggaaaatatcgtttatcagtgctgggagcgtttttgccaggaactgggtaagcaaattccagtggcgatgaccctggaaaagaatatgccgatcggtagcggcttaggctccagtgcctgtagcgtggtcgcggcgctgatggcgatgaatgaacactgcggcaagccgcttaatgacactcgtttgctggctttgatgggcgagctggaaggccgtatctccggcagcattcattacgacaacgtggcaccgtgttttctcggtggtatgcagttgatgatcgaagaaaacgacatcatcagccagcaagtgccagggtttgatgagtggctgtgggtgctggcgtatccggggattaaagtcagcacggcagaagccagggctattttaccggcgcagtatcgccgccaggattgcattgcgcacgggcgacatctggcaggcttcattcacgcctgctattcccgtcagcctgagcttgccgcgaagctgatgaaagatgttatcgctgaaccctaccgtgaacggttactgccaggcttccggcaggcgcggcaggcggtcgcggaaatcggcgcggtagcgagcggtatctccggctccggcccgaccttgttcgctctgtgtgacaagccggaaaccgcccagcgcgttgccgactggttgggtaagaactacctgcaaaatcaggaaggttttgttcatatttgccggctggatacggcgggcgcacgagtactggaaaactaaatgaaactctacaatctgaaagatcacaacgagcaggtcagctttgcgcaagccgtaacccaggggttgggcaaaaatcaggggctgttttttccgcacgacctgccggaattcagcctgactgaaattgatgagatgctgaagctggattttgtcacccgcagtgcgaagatcctcagcgcgtttattggtgatgaaatcccacaggaaatcctggaagagcgcgtgcgcgcggcgtttgccttcccggctccggtcgccaatgttgaaagcgatgtcggttgtctggaattgttccacgggccaacgctggcatttaaagatttcggcggtcgctttatggcacaaatgctgacccatattgcgggtgataagccagtgaccattctgaccgcgacctccggtgataccggagcggcagtggctcatgctttctacggtttaccgaatgtgaaagtggttatcctctatccacgaggcaaaatcagtccactgcaagaaaaactgttctgtacattgggcggcaatatcgaaactgttgccatcgacggcgatttcgatgcctgtcaggcgctggtgaagcaggcgtttgatgatgaagaactgaaagtggcgctagggttaaacagcgctaacagcattaacatcagccgtttgctggcgcagatttgctactactttgaagctgttgcgcagctgccgcaggagacgcgcaaccagctggttgtcagcgtgccaagcggaaacttcggcgatttgacggcgggtctgctggcgaagagtctcggtctgccggtgaaacgttttattgctgcgaccaacgtgaacgataccgtgccacgtttcctgcacgacggtcagtggagtcccaaagcgactcaggcgacgttatccaacgcgatggacgtgagtcagccgaacaactggccgcgtgtggaagagttgttccgccgcaaaatctggcaactgaaagagctgggttatgcagccgtggatgatgaaaccacgcaacagacaatgcgtgagctaaaagaactgggctacactagcgagccgcacgctgccgtagcttatcgtgcgctgcgtgatcagttgaatccaggcgaatatggcttgttcctcggcaccgcgcatccggcgaaatttaaagagagcgtggaagcgattctcggtgaaacgttggatctgccaaaagagctggcagaacgtgctgatttacccttgcttagtcataatctgcccgccgattttgctgcgttgcgtaaattgatgatgaatcatcagtaaaatctattcattatctcaatcaggccgggtttgcttttatgcagcccggcttttttatgaagaaattatggagaaaaatgacagggaaaaaggagaaattctcaataaatgcggtaacttagagattaggattgcggagaataacaaccgccgttctcatcgagtaatctccggatatcgacccataacgggcaatgataaaaggagtaacctgtgaaaaagatgcaatctatcgtactcgcactttccctggttctggtcgctcccatggcagcacaggctgcggaaattacgttagtcccgagtgtaaaattacagataggcgatcgtgataatcgtggctattactgggatggaggtcactggcgcgaccacggctggtggaaacaacattatgaatggcgaggcaatcgctggcacctacacggaccgccgccaccgccgcgccaccataagaaagctcctcatgatcatcacggcggtcatggtccaggcaaacatcaccgctaaatgacaaatgccgggtaacaatccggcattcagcgcctgatgcgacgctggcgcgtcttatcaggcctacgttaattctgcaatatattgaatctgcatgcttttgtaggcaggataaggcgttcacgccgcatccggcattgactgcaaacttaacgctgctcgtagcgtttaaacaccagttcgccattgctggaggaatcttcatcaaagaagtaaccttcgctattaaaaccagtcagttgctctggtttggtcagccgattttcaataatgaaacgactcatcagaccgcgtgctttcttagcgtagaagctgatgatcttaaatttgccgttcttctcatcgaggaacaccggcttgataatctcggcattcaatttcttcggcttcacgcttttaaaatactcatcactcgccagattaatcaccacattatcgccttgtgctgcgagcgcctcgttcagcttgttggtgatgatatctccccagaattgatacagatctttccctcgggcattctcaagacggatccccatttccagacgataaggctgcattaaatcgagcgggcggagtacgccatacaagccggaaagcattcgcaaatgctgttgggcaaaatcgaaatcgtcttcgctgaaggtttcggcctgcaagccggtgtagacatcacctttaaacgccagaatcgcctggcgggcattcgccggcgtgaaatctggctgccagtcatgaaagcgagcggcgttgatacccgccagtttgtcgctgatgcgcatcagcgtgctaatctgcggaggcgtcagtttccgcgcctcatggatcaactgctgggaattgtctaacagctccggcagcgtatagcgcgtggtggtcaacgggctttggtaatcaagcgttttcgcaggactaataagaatcagcatatccagtccttgcaggaaatttatgccgactttagcaaaaaatgagaatgagttgatcgatagttgtgattactcctggctaacatcatcccacgcgtccggagaaagctggcgaccgatatccggataacgcaatggatcaaacaccgggcgcacgccgagtttacgctggcgtagataatcactggcaatggtatgaaccacagggctgagcagtaaaatggcggtcaaattggtaatagccatgcaggccattatgatatctgccagttgccacatcagcggaaggcttagcaaggtgccgccgatgaccgttgcgaaggtgcagatccgcaaacaccagatcgctttagggttgttcaggcgtaaaaagaagagattgttttcggcataaatgtagttggcaacgatggagctgaaggcaaacagaataaccacaagggtaacaaactcagcaccccaggaacccattagcacccgcatcgccttctggataagctgaataccttccagcggcatgtaggttgtgccgttacccgccagtaatatcagcatggcgcttgccgtacagatgaccagggtgtcgataaaaatgccaatcatctggacaatcccttgcgctgccggatgcggaggccaggacgccgctgccgctgccgcgtttggcgtgctacccattcccgcctcattggaaaacatactgcgctgaaaaccgttagtaatcgcctggcttaaggtatatcccgccgcgccgcctgccgcttcctgccagccaaaagcactctcaaaaatagaccaaatgacgtggggaagttgcccgatattcattacgcaaattaccaggctggtcagtacccagattatcgccatcaacgggacaaagccctgcatgagccgggcgacgccatgaagaccgcgagtgattgccagcagagtaaagacagcgagaataatgcctgtcaccagcgggggaaaatcaaaagaaaaactcagggcgcgggcaacggcgttcgcttgaactccgctgaaaattatgccataggcgatgagcaaaaagacggcgaacagaacgcccatccagcgcatccccagcccgcgcgccatataccatgccggtccgccacgaaactgcccattgacgtcacgttctttataaagttgtgccagagaacattcggcaaagctggtcgccatgccgataaacgcggcaacccacatccaaaagacggctccaggtccaccggcggtaatagccagcgcaacgccggccaggttgccgctacccacgcgcgccgcaagactggtacacaaactctgaaaactggttaaaccgcctggctgtggatgaatgctatttttaagacttttgccaaactggcggatgtagcgaaactgcacaaatccggtgcgaaaagtgaaccaacaacctgcgccgaagagcaggtaaatcattacgcttccccaaaggacgctgttaatgaaggagaaaaaatctggcatgcatatccctcttattgccggccgcgatgactttcctgtgtaaacgttaccaattgtttaagaagtatatacgctacgaggtacttgataacttctgcgtagcatacatgaggttttgtataaaaatggcgggcgatatcaacgcagtgtcagaaatccgaaacagtctcgcctggcgataaccgtcttgtcggcggttgcgctgacgttgcgtcgtgatatcatcagggcagaccggttacatccccctaacaagctgtttaaagagaaatactatcatgacggacaaattgacctcccttcgtcagtacaccaccgtagtggccgacactggggacatcgcggcaatgaagctgtatcaaccgcaggatgccacaaccaacccttctctcattcttaacgcagcgcagattccggaataccgtaagttgattgatgatgctgtcgcctgggcgaaacagcagagcaacgatcgcgcgcagcagatcgtggacgcgaccgacaaactggcagtaaatattggtctggaaatcctgaaactggttccgggccgtatcagtactgaagttgatgcgcgtctttcctatgacaccgaagcgagtattgcgaaagcaaaacgcctgatcaaactctacaacgatgctggtattagcaacgatcgtattctgatcaaactggcttctacctggcagggtatccgtgctgcagaacagctggaaaaagaaggcatcaactgtaacctgaccctgctgttctccttcgctcaggctcgtgcttgtgcggaagcgggcgtgttcctgatcagcccgtttgttggccgtattcttgactggtacaaagcgaataccgataagaaagagtacgctccggcagaagatccgggcgtggtttctgtatctgaaatctaccagtactacaaagagcacggttatgaaaccgtggttatgggcgcaagcttccgtaacatcggcgaaattctggaactggcaggctgcgaccgtctgaccatcgcaccggcactgctgaaagagctggcggagagcgaaggggctatcgaacgtaaactgtcttacaccggcgaagtgaaagcgcgtccggcgcgtatcactgagtccgagttcctgtggcagcacaaccaggatccaatggcagtagataaactggcggaaggtatccgtaagtttgctattgaccaggaaaaactggaaaaaatgatcggcgatctgctgtaatcattcttagcgtgaccgggaagtcggtcacgctacctcttctgaagcctgtctgtcactcccttcgcagtgtatcattctgtttaacgagactgtttaaacggaaaaatcttgatgaatactttacgtattggcttagtttccatctctgatcgcgcatccagcggcgtttatcaggataaaggcatccctgcgctggaagaatggctgacaagcgcgctaaccacgccgtttgaactggaaacccgcttaatccccgatgagcaggcgatcatcgagcaaacgttgtgtgagctggtggatgaaatgagttgccatctggtgctcaccacgggcggaactggcccggcgcgtcgtgacgtaacgcccgatgcgacgctggcagtagcggaccgcgagatgcctggctttggtgaacagatgcgccagatcagcctgcattttgtaccaactgcgatccttagccgtcaggtgggcgtgattcgcaaacaggcgctgatccttaacttacccggtcagccgaagtctattaaagagacgctggaaggtgtgaaggacgctgagggtaacgttgtggtacacggtatttttgccagcgtaccgtactgcattcagttgctggaagggccatacgttgaaacggcaccggaagtggttgcagcattcagaccgaagagtgcaagacgcgacgttagcgaataaaaaaatccccccgagcggggggatctcaaaacaattagtgggattcaccaatcggcagaacggtgcgaccaaactgctcgttcagtacttcacccatcgccagatagattgcgctggcaccgcagatcagcccaatccagccggcaaagtggatgattgcggcgttaccggcaatgttaccgatcgccagcagggcaaacagcacggtcaggctaaagaaaacgaattgcagaacgcgtgcgcctttcagcgtgccgaagaacataaacagcgtaaatacgccccacagacccaggtagacaccaaggaactgtgcatttggcgcatcggtcagacccagtttcggcatcagcagaatcgcaaccagcgtcagccagaaagaaccgtaagaggtgaatgcggttaaaccgaaagtgttgccttttttgtactccagcagaccagcaaaaatttgcgcgatgccgccgtagaaaatgcccatggcaagaataatgccgtccagagcgaaataacccacgttgtgcaggttaagcagaatggtggtcatgccgaagcccatcaggcccagcggtgccggattagccaacttagtgttgcccataattcctcaaaaatcatcatcgaatgaatggtgaaataatttccctgaataactgtagtgttttcagggcgcggcataataatcagccagtggggcagtgtctacgatcttttgaggggaaaatgaaaattttccccggtttccggtatcagacctgagtggcgctaaccatccggcgcaggcaggcgatttgcagtacggctggaatcgtcacgcgataggcgctgccgctgaccgctttaaccccatttagtgccgcacctacagggccttccagccccgcgccgcgcagcaaaccatgcccaagtacgctcattgctgcgtgggtgcgtaaaatgcgggtcagttggctggaaagcaaatggctcacaccttttgccaataatttgtctttcatcagcagcggcagcagctcttccagctcattcaccctggcatcgaccgcgtgcagaaactcctgcttatgttcctcgtccattttcttccaggtattacgcagaaattgttccagtaactgttgctcaatttcaaacgtagacatctctttgtcggctttcagcttcaatcgcttactaacatcgagcaaaatggcccgatacaatttaccgtgtccgcgcagtttgttggcgatactatcgccaccaaaatgctgtaattctccggcaatcagctgccagttgcggcgatgttgctcgggatgcccttccatgcttttaaacagttcgttgcgcatcagtacgctggagaggcgagttttgcctttttcattatgggtgagcaatcgggcgaaatttgccaactgttcctcactacaatgctgaagaaaatccagatcactatcattcaggtaattaacattcattttttgtggcttctatattctggcgttagtcgtcgccgataattttcagcgtggccatatcgctactgttcaccgtatgaccgctaaaggtgattttactgacgcagcgtttattgtcgttatcgctgttaatgttgatccagtcagtggtttgcccttcttttatttcactaggaatattcaggctctgactggcgctacgggcggctttgaaataaacgcttgcaccgcttaactgtaaatcgccatggtcggcagagagttgtatgcgtttcacaatgcgacaaacaggaagtttcagcgccagatcgttggtttcgttacgcggcattgcaatggcgccgaggagtttatggtcgtttgcctgcgccgtgcagcacagcatcaggctaatcgccaggctggcggaaatcgtaaaaacggatttcataaggattctcttagtgggaagaggtagggggatgaatacccactagtttactgctgataaagagaagattcaggcacgtaatcttttctttttattacaattttttgatgaatgccttggctgcgattcattctttatatgaataaaattgctgtcaattttacgtcttgtcctgccatatcgcgaaatttctgcgcaaaagcacaaaaaatttttgcatctcccccttgatgacgtggtttacgaccccatttagtagtcaaccgcagtgagtgagtctgcaaaaaaatgaaattgggcagttgaaaccagacgtttcgcccctattacagactcacaaccacatgatgaccgaatatatagtggagacgtttagatgggtaaaataattggtatcgacctgggtactaccaactcttgtgtagcgattatggatggcaccactcctcgcgtgctggagaacgccgaaggcgatcgcaccacgccttctatcattgcctatacccaggatggtgaaactctagttggtcagccggctaaacgtcaggcagtgacgaacccgcaaaacactctgtttgcgattaaacgcctgattggtcgccgcttccaggacgaagaagtacagcgtgatgtttccatcatgccgttcaaaattattgctgctgataacggcgacgcatgggtcgaagttaaaggccagaaaatggcaccgccgcagatttctgctgaagtgctgaaaaaaatgaagaaaaccgctgaagattacctgggtgaaccggtaactgaagctgttatcaccgtaccggcatactttaacgatgctcagcgtcaggcaaccaaagacgcaggccgtatcgctggtctggaagtaaaacgtatcatcaacgaaccgaccgcagctgcgctggcttacggtctggacaaaggcactggcaaccgtactatcgcggtttatgacctgggtggtggtactttcgatatttctattatcgaaatcgacgaagttgacggcgaaaaaaccttcgaagttctggcaaccaacggtgatacccacctggggggtgaagacttcgacagccgtctgatcaactatctggttgaagaattcaagaaagatcagggcattgacctgcgcaacgatccgctggcaatgcagcgcctgaaagaagcggcagaaaaagcgaaaatcgaactgtcttccgctcagcagaccgacgttaacctgccatacatcactgcagacgcgaccggtccgaaacacatgaacatcaaagtgactcgtgcgaaactggaaagcctggttgaagatctggtaaaccgttccattgagccgctgaaagttgcactgcaggacgctggcctgtccgtatctgatatcgacgacgttatcctcgttggtggtcagactcgtatgccaatggttcagaagaaagttgctgagttctttggtaaagagccgcgtaaagacgttaacccggacgaagctgtagcaatcggtgctgctgttcagggtggtgttctgactggtgacgtaaaagacgtactgctgctggacgttaccccgctgtctctgggtatcgaaaccatgggcggtgtgatgacgacgctgatcgcgaaaaacaccactatcccgaccaagcacagccaggtgttctctaccgctgaagacaaccagtctgcggtaaccatccatgtgctgcagggtgaacgtaaacgtgcggctgataacaaatctctgggtcagttcaacctagatggtatcaacccggcaccgcgcggcatgccgcagatcgaagttaccttcgatatcgatgctgacggtatcctgcacgtttccgcgaaagataaaaacagcggtaaagagcagaagatcaccatcaaggcttcttctggtctgaacgaagatgaaatccagaaaatggtacgcgacgcagaagctaacgccgaagctgaccgtaagtttgaagagctggtacagactcgcaaccagggcgaccatctgctgcacagcacccgtaagcaggttgaagaagcaggcgacaaactgccggctgacgacaaaactgctatcgagtctgcgctgactgcactggaaactgctctgaaaggtgaagacaaagccgctatcgaagcgaaaatgcaggaactggcacaggtttcccagaaactgatggaaatcgcccagcagcaacatgcccagcagcagactgccggtgctgatgcttctgcaaacaacgcgaaagatgacgatgttgtcgacgctgaatttgaagaagtcaaagacaaaaaataatcgccctataaacgggtaattatactgacacgggcgaaggggaatttcctctccgcccgtgcattcatctaggggcaatttaaaaaagatggctaagcaagattattacgagattttaggcgtttccaaaacagcggaagagcgtgaaatcagaaaggcctacaaacgcctggccatgaaataccacccggaccgtaaccagggtgacaaagaggccgaggcgaaatttaaagagatcaaggaagcttatgaagttctgaccgacagccaaaaacgtgcggcatacgatcagtatggtcatgctgcgtttgagcaaggtggcatgggcggcggcggttttggcggcggcgcagacttcagcgatatttttggtgacgttttcggcgatatttttggcggcggacgtggtcgtcaacgtgcggcgcgcggtgctgatttacgctataacatggagctcaccctcgaagaagctgtacgtggcgtgaccaaagagatccgcattccgactctggaagagtgtgacgtttgccacggtagcggtgcaaaaccaggtacacagccgcagacttgtccgacctgtcatggttctggtcaggtgcagatgcgccagggattcttcgctgtacagcagacctgtccacactgtcagggccgcggtacgctgatcaaagatccgtgcaacaaatgtcatggtcatggtcgtgttgagcgcagcaaaacgctgtccgttaaaatcccggcaggggtggacactggagaccgcatccgtcttgcgggcgaaggtgaagcgggcgagcatggcgcaccggcaggcgatctgtacgttcaggttcaggttaaacagcacccgattttcgagcgtgaaggcaacaacctgtattgcgaagtcccgatcaacttcgctatggcggcgctgggtggcgaaatcgaagtaccgacccttgatggtcgcgtcaaactgaaagtgcctggcgaaacccagaccggtaagctattccgtatgcgcggtaaaggcgtcaagtctgtccgcggtggcgcacagggtgatttgctgtgccgcgttgtcgtcgaaacaccggtaggcctgaacgaaaggcagaaacagctgctgcaagagctgcaagaaagcttcggtggcccaaccggcgagcacaacagcccgcgcagtaagagcttctttgatggtgtgaagaagttttttgacgacctgacccgctaacctccccaaaagcctgcccgtgggcaggcctgggtaaaaatagggtgcgttgaagatatgcgagcacctgtaaagtggcggggatcactctacctcaatgtgtatcacaatatccatattctttgtgggggagtctggagattgagtagatattcttgttcagaatgtatcagccgatggttctacgattcttaagccacgaagagttcagatagtacaacggcatgtctcttttgactatctggcaaccggcagtgtgttctctcacgcatcacaaaagcagcaggcataaaaaaacccgcttgcgcgggctttttcacaaagcttcagcaaattggcgattaagccagtttgttgatctgtgcagtcaggttagccttatgacgtgcagctttgtttttgtggatcagacctttagcagcctgacggtccacgatcggttgcatttcgttaaatgctttctgtgcagcagctttgtcgccagcttcgatagctgcgtatactttcttgatgaaagtacgcatcatagagcgacggcttgcgttgtgcttacgagccttttcagactgaatggcgcgcttcttagcacttttgatattagccaaggtccaactcccaaatgtgttctatatggacaattcaaaggccgaggaatatgcccttttagccttcttttgtcaatggatttgtgcaaataagcgccgttaatgtgccggcacagcttacgtagtgatggcgcaggattctaccagcttgcggggtgtgaatacagcttttccgcgataaaaattgcagcaggcggtcagtttcttcccgtgatttgcgccatggcaatgaaaagccacttctttctgattagcgtactcaatcgccggttaaccttgaccgctgtacaaggtatactcggacgatttagcctgttttgagccagacatgaagctgatacgcggcatacataatctcagccaggccccgcaagaagggtgtgtgctgactattggtaatttcgacggcgtgcatcgcggtcatcgcgcgctgttacagggcttgcaggaagaagggcgcaagcgcaacttaccggtgatggtgatgctttttgaacctcaaccactggaactgtttgctaccgataaagccccggcaagactgacccggctgcgggaaaaactgcgttaccttgcagagtgtggcgttgattacgtgctgtgcgtgcgtttcgacaggcgtttcgcggcgttaaccgcgcaaaatttcatcagcgatcttctggtgaagcatttgcgcgtaaaatttcttgccgtaggtgatgatttccgctttggcgctggtcgtgaaggcgatttcttgttattacagaaagctggcatggaatacggcttcgatatcaccagtacgcaaactttttgcgaaggtggcgtgcgcatcagcagcaccgccgtgcgtcaggcccttgcggatgacaatctggctctggcagagagtttactggggcacccgtttgccatctccgggcgtgtagtccacggtgatgaattagggcgcactataggtttcccgacggcgaatgtaccgctgcgccgtcaggtttccccggtgaaaggggtttatgcggtagaagtgctgggcctcggtgaaaagccgttacccggcgtggcaaacatcggaacacgcccaacggttgccggtattcgccagcagctggaagtgcatttgttagatgttgcaatggacctttacggtcgccatatacaagtagtgctgcgtaaaaaaatacgcaatgagcagcgatttgcgagcctggacgaactgaaagcgcagattgcgcgtgatgaattaaccgcccgcgaattttttgggctaacaaaaccggcttaagcctgttatgtaatcaaaccgaaatacggaaccgagaatctgatgagtgactataaaagtaccctgaatttgccggaaacagggttcccgatgcgtggcgatctcgccaagcgcgaacccggaatgctggcgcgttggactgatgatgatctgtacggcatcatccgtgcggctaaaaaaggcaaaaaaaccttcattctgcatgatggccctccttatgcgaatggcagcattcatattggtcacagcgttaacaagattctgaaagacattatcgtgaagtccaaagggctttccggttatgacagcccgtatgtgcctggctgggactgccacggtctgccgatcgagctgaaagtcgagcaagaatacggtaagccgggtgagaaattcaccgccgccgagttccgcgccaagtgccgcgaatacgcggcgacccaggttgacggtcaacgcaaagactttatccgtctgggcgtgctgggcgactggagccacccgtacctgaccatggacttcaaaactgaagccaacatcatccgcgcgctgggcaaaatcatcggcaacggtcacctgcacaaaggcgcgaagccagttcactggtgcgttgactgccgttctgcgctggcggaagcggaagttgagtattacgacaaaacttctccgtccatcgacgttgctttccaggcagtcgatcaggatgcactgaaagcaaaatttgccgtaagcaacgttaacggcccaatcagcctggtaatctggaccaccacgccgtggactctgcctgccaaccgcgcaatctctattgcaccagatttcgactatgcgctggtgcagatcgacggtcaggccgtgattctggcgaaagatctggttgaaagcgtaatgcagcgtatcggcgtgaccgattacaccattctcggcacggtaaaaggtgcggagcttgagctgctgcgctttacccatccgtttatgggcttcgacgttccggcaatcctcggcgatcacgttaccctggatgccggtaccggtgccgttcacaccgcgcctggccacggcccggacgactatgtgatcggtcagaaatacggcctggaaaccgctaacccggttggcccggacggcacttatctgccgggcacttatccgacgctggatggcgtgaacgtcttcaaagcgaacgacatcgtcgttgcgctgctgcaggaaaaaggcgcgctgctgcacgttgagaaaatgcagcacagctatccgtgctgctggcgtcacaaaacgccgatcatcttccgcgcgacgccgcagtggttcgtcagcatggatcagaaaggtctgcgtgcgcagagtctgaaagagatcaaaggcgtgcagtggatcccggactggggccaggcgcgtatcgagagcatggttgctaaccgtcctgactggtgtatctcccgtcagcgcacctggggtgtaccgatgagtctgttcgtgcacaaagacacggaagagctgcatccgcgtacccttgaactgatggaagaagtggcaaaacgcgttgaagtcgatggcatccaggcgtggtgggatctcgatgcgaaagagatcctcggcgacgaagctgatcagtacgtgaaagtgccggacacattggatgtatggtttgactccggatctacccactcttctgttgttgacgtgcgtccggaatttgccggtcacgcagcggacatgtatctggaaggttctgaccaacaccgcggctggttcatgtcttccctaatgatctccaccgcgatgaagggtaaagcgccgtatcgtcaggtactgacccacggctttaccgtggatggtcagggccgcaagatgtctaaatccatcggcaataccgttagcccgcaggatgtgatgaacaaactgggcgcggatattctgcgtctgtgggtggcaagtaccgactacaccggtgaaatggccgtttctgacgagatcctgaaacgtgctgccgatagctatcgtcgtatccgtaacaccgcgcgcttcctgctggcaaacctgaacggttttgatccagcaaaagatatggtgaaaccggaagagatggtggtactggatcgctgggccgtaggttgtgcgaaagcggcacaggaagacatcctcaaggcgtacgaagcatacgatttccacgaagtggtacagcgtctgatgcgcttctgctccgttgagatgggttccttctacctcgacatcatcaaagaccgtcagtacaccgccaaagcggacagtgtggcgcgtcgtagctgccagactgcgctatatcacatcgcagaagcgctggtgcgctggatggcaccaatcctctccttcaccgctgatgaagtgtggggctacctgccgggcgaacgtgaaaaatacgtcttcaccggtgagtggtacgaaggcctgtttggcctggcagacagtgaagcgatgaacgatgcgttctgggacgagctgttgaaagtgcgtggcgaagtgaacaaagtcattgagcaagcgcgtgccgacaagaaagtgggtggcagcctggaagcggcagtaaccttgtatgcagaaccggaactgagcgcgaaactgaccgcgctgggcgatgaattacgatttgtcctgttgacctccggcgctaccgttgcagactataacgacgcacctgctgatgctcagcagagcgaagtactcaaagggctgaaagtcgcgttgagtaaagccgaaggtgagaagtgcccacgctgctggcactacacccaggatgtcggcaaggtggcggaacacgcagaaatctgcggccgctgtgtcagcaacgtcgccggtgacggtgaaaaacgtaagtttgcctgatgagtcaaagcatctgtagtacagggctacgctggctgtggctggtggtagtcgtgctgattatcgatctgggcagcaaatacctgatcctccagaactttgctctgggggatacggtcccgctgttcccgagccttaatctgcattatgcgcgtaactatggcgcggcgtttagtttccttgccgatagcggcggctggcagcgttggttctttgccggtattgcgattggtattagcgtgatcctggcagtgatgatgtatcgcagcaaggccacgcagaagctaaacaatatcgcttacgcgctgattattggcggcgcgctgggcaacctgttcgaccgcctgtggcacggcttcgttgtcgatatgatcgacttctacgtcggcgactggcacttcgccaccttcaaccttgccgatactgccatctgtgtcggtgcggcactgattgtgctggaaggttttttgccttctagagcgaaaaaacaataataaaccctgccggatgcgatgctgacgcatcttatccggcctacagattgctgcgaaatcgtaggccggataaggcgtttacgccgcatccggcaaaaatccttaaatataagagcaaacctgcatgtctgaatctgtacagagcaatagcgccgtcctggtgcacttcacgctaaaactcgacgatggcaccaccgccgagtctacccgcaacaacggtaaaccggcgctgttccgcctgggtgatgcttctctttctgaagggctggagcaacacctgttggggctgaaagtgggcgataaaaccaccttcagcttggagccagatgcggcgtttggcgtgccgagtccggacctgattcagtacttctcccgccgtgaatttatggatgcaggcgagccagaaattggcgcaatcatgctttttaccgcaatggatggcagtgagatgcctggcgtgatccgcgaaattaacggcgactccattaccgttgatttcaaccatccgctggccgggcagaccgttcattttgatattgaagtgctggaaatcgatccggcactggaggcgtaacatgcagatcctgttggccaacccgcgtggtttttgtgccggggtagaccgcgctatcagcattgttgaaaacgcgctggccatttacggcgcaccgatatatgtccgtcacgaagtggtacataaccgctatgtggtcgatagcttgcgtgagcgtggggctatctttattgagcagattagcgaagtaccggacggcgcgatcctgattttctccgcacacggtgtttctcaggcggtacgtaacgaagcaaaaagtcgcgatttgacggtgtttgatgccacctgtccgctggtgaccaaagtgcatatggaagtcgcccgcgccagtcgccgtggcgaagaatctattctcatcggtcacgccgggcacccggaagtggaagggacaatgggccagtacagtaacccggaagggggaatgtatctggtcgaaagcccggacgatgtgtggaaactgacggtcaaaaacgaagagaagctctcctttatgacccagaccacgctgagcgtggatgacacgtctgatgtgatcgacgcgctgcgtaaacgcttcccgaaaattgtcggtccgcgcaaagatgacatctgctacgccacgactaaccgtcaggaagcggtacgcgccctggcagaacaggcggaagttgtgttggtggtcggtagcaaaaactcctccaactccaaccgtctggcggagctggcccagcgtatgggcaaacgcgcgtttttgattgacgatgcgaaagacatccaggaagagtgggtgaaagaggttaaatgcgtcggcgtgactgcgggcgcaagcgctccggatattctggtgcagaatgtggtggcgcgtttgcagcagctgggcggtggtgaagccattccgctggaaggccgtgaagaaaacattgttttcgaagtgccgaaagagctgcgtgtcgatattcgtgaagtcgattaagtcattagcagcctaagttatgcgaaaatgccggtcttgttaccggcattttttatggagaaaacatgcgtttacctatcttcctcgatactgaccccggcattgacgatgccgtcgccattgccgccgcgatttttgcacccgaactcgacctgcaactgatgaccaccgtcgcgggtaatgtcagcgttgagaaaactacccgcaatgccctgcaactgctgcatttctggaatgcggagattccgctcgcccaaggggccgctgtgccactggtacgcgcaccgcgtgatgcggcatctgtgcacggcgaaagcggaatggctggctacgactttgttgagcacaaccgaaagccgctcgggataccggcgtttctggcgattcgggatgccctgatgcgtgcaccagagcctgttaccctggtggccatcggcccgttaaccaatattgcgctgttacttagtcaatgcccggaatgcaagccgtatattcgccgtctggtgatcatgggtggttctgccggacgcggcaactgtacgccaaacgccgagtttaatattgctgccgatccagaagctgctgcctgtgtcttccgcagtggtattgaaatcgtcatgtgcggtttggatgtcaccaatcaggcaatattaactcctgactatctctctacactgccgcagttaaaccgtaccgggaaaatgcttcacgccctgtttagccactaccgtagcggcagtatgcaaagcggcttgcgaatgcacgatctctgcgccatcgcctggctggtgcgcccggacctgttcactctcaaaccctgttttgtggcagtggaaactcagggcgaatttaccagtggcacgacggtggttgatatcgacggttgcctgggcaagccagccaatgtacaggtggcattggatctggatgtgaaaggcttccagcagtgggtggctgaggtgctggctctggcgagctaacctgtcacatgttattggcatgcagtcattcatcgactcatgcctttcactgatatccctccctgtttatcattaatttctaattatcagcgtttttggctggcggcgtagcgatgcgctggttactctgaaaacggtctatgcaaattaacaaaagagaatagctatgcatgatgcaaacatccgcgttgccatcgcgggagccggggggcgtatgggccgccagttgattcaggcggcgctggcattagagggcgtgcagttgggcgctgcgctggagcgtgaaggatcttctttactgggcagcgacgccggtgagctggccggagccgggaaaacaggcgttaccgtgcaaagcagcctcgatgcggtaaaagatgattttgatgtgtttatcgattttacccgtccggaaggtacgctgaaccatctcgctttttgtcgccagcatggcaaagggatggtgatcggcactacggggtttgacgaagccggtaaacaagcaattcgtgacgccgctgccgatattgcgattgtctttgctgccaattttagcgttggcgttaacgtcatgcttaagctgctggagaaagcagccaaagtgatgggtgactacaccgatatcgaaattattgaagcacatcatagacataaagttgatgcgccgagtggcaccgcactggcaatgggagaggcgatcgcccacgcccttgataaagatctgaaagattgcgcggtctacagtcgtgaaggccacaccggtgaacgtgtgcctggcaccattggttttgccaccgtgcgtgcaggtgacatcgttggtgaacataccgcgatgtttgccgatattggcgagcgtctggagatcacccataaggcgtccagccgtatgacatttgctaacggcgcggtaagaagcgctttgtggttgagtggtaaggaaagcggtctttttgatatgcgagatgtacttgatctcaataatttgtaaccacaaaatatttgttatggtgcaaaaataacacatttaatttattgattataaagggctttaatttttggcccttttatttttggtgttatgtttttaaattgtctataagtgccaaaaattacatgttttgtcttctgtttttgttgttttaatgtaaattttgaccatttggtccacttttttctgctcgtttttatttcatgcaatcttcttgctgcgcaagcgttttccagaacaggttagatgatctttttgtcgcttaatgcctgtaaaacatgcatgagccacaaaataatataaaaaatcccgccattaagttgacttttagcgcccatatctccagaatgccgccgtttgccagaaattcgtcggtaagcagatttgcattgatttacgtcatcattgtgaattaatatgcaaataaagtgagtgaatattctctggagggtgttttgattaagagtgcgctattggttctggaagacggaacccagtttcacggtcgggccataggggcaacaggtagcgcggttggggaagtcgttttcaatactagtatgaccggttatcaagaaatcctcactgatccttcctattctcgtcaaatcgttactcttacttatccccatattggcaatgtcggcaccaatgacgccgatgaagaatcttctcaggtacatgcacaaggtctggtgattcgcgacctgccgctgattgccagcaacttccgtaataccgaagacctctcttcttacctgaaacgccataacatcgtggcgattgccgatatcgatacccgtaagctgacgcgtttactgcgcgagaaaggcgcacagaatggctgcattatcgcgggcgataacccggatgcggcgctggcgttagaaaaagcccgcgcgttcccaggtctgaatggcatggatctggcaaaagaagtgaccaccgcagaagcctatagctggacacaagggagctggacgttgaccggtggcctgccagaagcgaaaaaagaagacgagctgccgttccacgtcgtggcttatgattttggtgccaagcgcaacatcctgcggatgctggtggatagaggctgtcgcctgaccatcgttccggcgcaaacttctgcggaagatgtgctgaaaatgaatccagacggcatcttcctctccaacggtcctggcgacccggccccgtgcgattacgccattaccgccatccagaaattcctcgaaaccgatattccggtattcggcatctgtctcggtcatcagctgctggcgctggcgagcggtgcgaagactgtcaaaatgaaatttggtcaccacggcggcaaccatccggttaaagatgtggagaaaaacgtggtaatgatcaccgcccagaaccacggttttgcggtggacgaagcaacattacctgcaaacctgcgtgtcacgcataaatccctgttcgacggtacgttacagggcattcatcgcaccgataaaccggcattcagcttccaggggcaccctgaagccagccctggtccacacgacgccgcgccgttgttcgaccactttatcgagttaattgagcagtaccgtaaaaccgctaagtaatcaggagtaaaagagccatgccaaaacgtacagatataaaaagtatcctgattctgggtgcgggcccgattgttatcggtcaggcgtgtgagtttgactactctggcgcgcaagcgtgtaaagccctgcgtgaagagggttaccgcgtcattctggtgaactccaacccggcgaccatcatgaccgacccggaaatggctgatgcaacctacatcgagccgattcactgggaagttgtacgcaagattattgaaaaagagcgcccggacgcggtgctgccaacgatgggcggtcagacggcgctgaactgcgcgctggagctggaacgtcagggcgtgttggaagagttcggtgtcaccatgattggtgccactgccgatgcgattgataaagcagaagaccgccgtcgtttcgacgtagcgatgaagaaaattggtctggaaaccgcgcgttccggtatcgcacacacgatggaagaagcgctggcggttgccgctgacgtgggcttcccgtgcattattcgcccatcctttaccatgggcggtagcggcggcggtatcgcttataaccgtgaagagtttgaagaaatttgcgcccgcggtctggatctctctccgaccaaagagttgctgattgatgagagcctgatcggctggaaagagtacgagatggaagtggtgcgtgataaaaacgacaactgcatcatcgtctgctctatcgaaaacttcgatgcgatgggcatccacaccggtgactccatcactgtcgcgccagcccaaacgctgaccgacaaagaatatcaaatcatgcgtaacgccagcatggcggtgctgcgtgaaatcggcgttgaaaccggtggttccaacgttcagtttgcggtgaacccgaaaaacggtcgtctgattgttatcgaaatgaacccacgcgtgtcccgttctagcgcgctggcgagcaaagcgaccggtttcccgattgctaaagtggcggcgaaactggcggtgggttacaccctcgacgaactgatgaacgacatcactggcggacgtactccggcctccttcgagccgtccatcgactatgtggttactaaaattcctcgcttcaacttcgaaaaattcgccggtgctaacgaccgtctgaccactcagatgaaaagcgttggcgaagtgatggcgattggtcgcacgcagcaggaatccctgcaaaaagcgctgcgcggcctggaagtcggtgcgactggattcgacccgaaagtgagcctggatgacccggaagcgttaaccaaaatccgtcgcgaactgaaagacgcaggcgcagatcgtatctggtacatcgccgatgcgttccgtgcgggcctgtctgtggacggcgtcttcaacctgaccaacattgaccgctggttcctggtacagattgaagagctggtgcgtctggaagagaaagtggcggaagtgggcatcactggcctgaacgctgacttcctgcgccagctgaaacgcaaaggctttgccgatgcgcgcttggcaaaactggcgggcgtacgcgaagcggaaatccgtaagctgcgtgaccagtatgacctgcacccggtttataagcgcgtggatacctgtgcggcagagttcgccaccgacaccgcttacatgtactccacttatgaagaagagtgcgaagcgaatccgtctaccgaccgtgaaaaaatcatggtgcttggcggcggcccgaaccgtatcggtcagggtatcgaattcgactactgttgcgtacacgccagcctggcgctgcgcgaagacggttacgaaaccattatggttaactgtaacccggaaaccgtctccaccgactacgacacttccgaccgcctctacttcgagccggtaactctggaagatgtgctggaaatcgtgcgtatcgagaagccgaaaggcgttatcgtccagtacggcggtcagaccccgctgaaactggcgcgcgcgctggaagctgctggcgtaccggttatcggcaccagcccggatgctatcgaccgtgcagaagaccgtgaacgcttccagcatgcggttgagcgtctgaaactgaaacaaccggcgaacgccaccgttaccgctattgaaatggcggtagagaaggcgaaagagattggctacccgctggtggtacgtccgtcttacgttctcggcggtcgggcgatggaaatcgtctatgacgaagctgacctgcgtcgctacttccagacggcggtcagcgtgtctaacgatgcgccagtgttgctggaccacttcctcgatgacgcggtagaagttgacgtggatgccatctgcgacggcgaaatggtgctgattggcggcatcatggaacatattgagcaggcgggcgtgcactccggtgactccgcatgttctctgccagcctacaccttaagtcaggaaattcaggatgtgatgcgccagcaggtgcagaaactggccttcgaattgcaggtgcgcggcctgatgaacgtgcagtttgcggtgaaaaacaacgaagtctacctgattgaagttaacccgcgtgcggcgcgtaccgttccgttcgtctccaaagccaccggcgtaccgctggcaaaagtggcggcgcgcgtgatggctggcaaaagcctggctgagcagggcgtaaccaaagaagttatcccgccgtactacagcgtgaaagaagtggtgctgccgttcaataaattcccgggcgttgacccgctgttagggccagaaatgcgctctaccggggaagtcatgggcgtgggccgcaccttcgctgaagcgtttgccaaagcgcagctgggcagcaactccaccatgaagaaacacggtcgtgcgctgctttccgtgcgcgaaggcgataaagaacgcgtggtggacctggcggcaaaactgctgaaacagggcttcgagctggatgcgacccacggcacggcgattgtgctgggcgaagcaggtatcaacccgcgtctggtaaacaaggtgcatgaaggccgtccgcacattcaggaccgtatcaagaatggcgaatatacctacatcatcaacaccaccagtggccgtcgtgcgattgaagactcccgcgtgattcgtcgcagtgcgctgcaatataaagtgcattacgacaccaccctgaacggcggctttgccaccgcgatggcgctgaatgccgatgcgactgaaaaagtaattagcgtgcaggaaatgcacgcacagatcaaataatagcgtgtcatggcagatatttttcatccgctaatttgatcgaataactaatacggttctctgatgaggaccgtttttttttgcccattaagtaaatcttttggggaatcgatatttttgatgacataagcaggatttagctcacacttatcgacggtgaagttgcatactatcgatatatccacaattttaatatggccttgtttaattgcttcaaaacgagtcatagccagacttttaatttgtgaaactggagttcgtatgtgtgaaggatatgttgaaaaaccactctacttgttaatcgccgaatggatgatggctgaaaatcggtgggtgatagcaagagagatctctattcatttcgatattgaacacagcaaggcggttaataccctgacttatattctgagcgaagtcacagaaataagctgcgaagttaagatgatccctaataagctggaagggcggggatgccagtgtcagcgactggttaaagtggtcgatatcgatgagcaaatttacgcgcgcctgcgcaataacagtcgggaaaaattagtcggtgtaagaaagacgccgcgtattcctgccgttccgctcacggaacttaaccgcgagcagaagtggcagatgatgttgagtaagagtatgcgtcgttaattttatctcgttgataccgggcgtcctgcttgccagatgcgatgttgtagcatcttatccagcaaccaggtcgcatccggcaagatcaccgtttaggcgtcacatccgtcgtcccctgcaaacgggggcgattttcctccatttgcctcagtggctgcgtttcatgtaagcttacatgacagcgcccgacaagatcctgatactctttggtattcaaccgtttccagtgtaactcgtcgtcactaacattgcgtacagcgcgggctggcgtacccatcaacaactggcgtttctcgccgcgaaagcccgctttgacaaagctcatggcggcaacaatgctctcttcgccaatgaccgcgccatccataatcacgctgttcatcccgaccaatgcatcgcgaccaatcaaacaaccatgcaggatcgctccgtgcccgatatggccgttttccccaacgatagtgtcagtgtcgcagtagccatgcataatgcagccatcctgaatattggctcccgcttgcacgatcaaccgcccgtagtcaccacgcagactggcgagtgggccgatgtagacaccggctcccacaatcacatcgccaatcaagacggcactgggatggacaaacgccgtcgggtgaaccaccggaattaacccctcaaaggcgtaatagctcacggttgttaacgtcctttccacaccggatcgcgcttctcggcaaacgccagcggcccttcaatggcatcttcgctatgcagaacgcttggatagtgtttcaacacgccgctgcgaatatagcgatacgcttcttctaccggcatttcgctggtggtgcggtagatctctttcagcgccgcaatcgccagcggggcgctgttaaccagctgctgagccagttcgcgggcgttatccatcagttccgcctggctaaccacgcggttgactatcccccaacgcagcgcctcttctgcgcccattcgtctgccggtcatcaccatttcattgacgatggcaggcggcaggatcttcggcagacgcagcacaccgccgctgtcaggaacgatgcccagtttggcttccggcagggcgaagctggcgttatcggcacaaacaataaaatctgccgccagcgccagttcaaagccgccgccaaaggcatagccgttcacagctgcgataaccggtttgtcgagattgaaaatttcggttaatcccgcaaaaccacccggaccaaagtcagcatccggtgcttcgccttctgctgccgcttttaaatcccagcccgcggaaaagaacttctctccggcaccggtaataatggcgacacgtaattgcggatcgtcacggaaatttagaaatacttcgcccatttcaaagctggtttttgcatcaatagcattcgcttttggacgatcaagggtaatttccagaatacttccattgcgggtcagatgtaaactttcactcattccttttctccatttttgctttttcagggagctcaacatccctgcaaaaaatgcatattgttttagagtgtgattattagctggcagggtagttccctgctgtttcatttatttcagattctttctaattattttcccgctgcaattacgtggcagatcttttctgatctccagataagagggcactttaaatttcgccatattttgttcgcagaagcggaaaaattcctcttcgctcaatgtttcaccttcattcagcaccacaaatgctttgatggcttcatcgcgaatgctatctttaatacccacaaccacgatgtcctgaattttcgggtgcgcggcgataatattttccagctccacgcaggagacattctcgccgccacgtttaatcatattgcagcggcgatcgacgaaataaaaaaagtcctcttcgtcgcggtatccggtatcgccggtatgcagccagccatcggcttccagcactttcgcagtggcttgtgggttgagaaagtactctttgaagatggttttcccaggtatgcctttaatgcagatttcaccgatctcaccagccgggagcgggcgattgtgatcgtcgcggatctccgcttcgtagcaaaaccccacccgaccaatgctcggccagcgtcgtttatcgccaggacgatcgccgataatgcccacaatggtttccgtcatcccataagacgtcagcaagcgaacgccgaagcgttcacaaaacgcatctttttcctgctcgctcaagttgagataaaacatcacttcccgcaggcggtgttgctgatcgttcgcactaggcggctgtaccatcaacgtacggatcatcatcggaatacattcggtaacggtggcgcggtacttctgtacctgtccccagaaggcgcgggcgctgtatttctcgaccagcacaaaggtggccccggcagaaaacgccgccatcgccgcagtacactggcaatcgatatgaaacgcaggcattaccgtcaggtagacgtcatcgtcacgcagtgcacactgccaggcggagtaatatccagcgaagcgcaggttgtaatgggtaatcaccacacctttcggtcgggaggtggtgccggaggtgaagagaatttccgccgtatcgtcagtgcttagcggcggtgcatagcacaaggtggcaggttgttgatttttcagttgagtaaagctactcacgccatcatcagcgggaagtgccacatctgtcaggcaaatgtgccgcaattgagtggcatcttcctgctgaatctgttgatacataggatagaattgcgcactggtcaccagcaggcacgcctggctattttgcaggatccacgcgctttccttgcacaacaggcgggcgttaatcggcaccataatcgcgccaatttttgccagcccgaaccagcaaaagataaattccgggcagttgtcgagatgtagtgcaaccttgtcgcctttgcgaatccccagcgtataaaacaggtttgccgtgcggttaatctcctgatttaactcaagataactataccggttaacgactccgccgctggattcacaaatcagcgccgttttatgaccgtaaacgtccgcaagatcgtcccacatttgacgtagatgttgtccgccaatgatatccattgcacctctatccatttttgttcgtttgttattgggcgggcgctagtcaggcaagccgactgacgccacgcgtttagtcctcaactttggccagacctttgctgaccaactcctgaatgtcgttttcgctgtagccgatatttttcaaaatggcagccgtgtccataccatgactgggcattccgcgccagatttgtccggggttatttttgaatttcggcatgatgttcggccctttgcaggtgcgaccatccatcgtttgccactgagtgatactttcgcgagccacatactgtggattgctttccagttccggtacggtcagcactttggcgcaggcgatattcagttcagcaaagcgttcttttacttccgcgatggtatgtgtcgccagccaggcatcgagtttctcttcaaccagtgggccgtaagggcattcgatacggtggataagctgagtgccttccgggatttctggcgtgccaagcagatgtgcgaggccaatatctttaaagcactcttcaatttgggtaatgcccaccagttccatcacgatgtagccgtcggcacatttatacagaccgcaaccggcgtagtagggatctttacctttgctcatgcgcgggcacatttcgccgccgttgaagtaatccatcatgaagtactggcccatacgcagcatcacttcatacatggcgatgtcgatactttcgcctttaccggtttcacgcactttatgcagtgctgccagcgccgccgtggtggcggtcaggccagaaaagtaatcggcggtatacgggaaggcaggcattggctggtcaacatcaccgttctgaatcaggtaaccactaaaggcctgggcgatagtgttataggccggaagattggtgtactcctcggtgccgtactgaccaaaaccggacaggtgagcgataaccagtttcgggttgtgctgccacagtacttcatcggtaatgccacgacgggcaaaggccggacctttactggcttcgatgaagatatcggtggtttccattaatttcagaaacgcttcgcggccttcatctttgaaaatatttaagctcagcgcgtgcaaattgcggcgggagagttgcgggtagttcggttgaacgcgaatggtgtcggcccaggcgacgttctcgatccagataacttccgcgccccattctgcgaacatttgcccggcaaacggtccggcgatttcgataccggagaagacaacgcgcaatccggccaacggcccgaatttcggcatgggtagatgatccattatttgctcctgaaaaatttatgtagcgcatgactgccggatgcggcgtaaacgctttatccggcctacattcgtgctcccgtaggcctgataagacgcatcagcgtcgcatcaggcagcgcacggacttagcggtattgcttcagcaccgcacgacccagcgtcaggatctgcatttcgtcagatcccccggagacgcggtctacacgcagatcacgccagaagcggctgatgcggtggttgcccgcaatcccgacaccgcccagcacctgcattgcgctatccacaacttcaaatgccgcattggcgcagaagtatttgcacatcgctgcatcgccagaggtgatggtgccgttgtctgctttccacgctgcttcatacagcatgtttttcatggagtttaatttgatcgccatgtgggcgaatttttcctgaatcaactggaaacgaccaatagcctcgccaaactgcacgcgctgattggcgtagcgcgccgcatcttcaaaggcgcacatcgccgtaccgtagttggtgagggctaccaggaaacgttcatggtcgaactcttctttgacgcggttaaagccgttaccttcccgaccgaacatgtctttctcgtccagttccacgtcgtcaaaggtgatttcacagcagctatccatacgcagaccgagcttttcaagtttggtcactttgatgcccggtttgctcatatcaacaaaccattcggtgtagacaggtttgtccggagaagccccgtcgcgcgccatcaccacgatgtacggggtgtaggcgctgctggtaataaaacacttactaccattaagataaatcttaccatttctacgggtataagtcgttttcaggctacccacgtcggagcccgcgcccggttcggtaatcgcactgttccacatctgcttaccggtgccgcggaaagccataattttgtcgatctgctcttgtgtgccttcgcgcaggaaggtgttgaacccgcccggcaactggtacagcacataggttggtgcccccagacgtcccagctccatccacacggcggcgagagtaacaaaccccgcgtccagaccaccgtgctcttcagggatcagcagactgtcgatacccatatccgccagtgctttgacaaaacgttccgggtagacgctgtcacggtcgcactcggcaaaataggcctcccagttttcgctggccatcagttcgcggataccggcgacaaacagttcctgctcatcatttaaattaaaatccatctttcaacctcttgatattttgggggttaattaatctttccagttctgtttcgcgtctttaataaaggagagcgtcaccataatgttgacgaagaacagcgggcatcctccggcgataatggcggtttgaatcggtttcaggccgccgagcgccagcagaacaataccgataatgccaaccagaatactccaaccgatacgcaccagcagaggtggttcttcaccatcgcgtacttcgcggcaagtggacatcgccagggtataagagcaggcgttaaccagcgtaacggtggcaataaagcagaggatgaagaagccccacatggtggcggtgctgagtggcagagcggcccaggtttcaatgatggcgcgcgccacaccgtactgttcgatcagatttggaatgttgatgatgtttttatctatcaacagcagagtgttactaccgagtacagtccacaggatccaggtactcgctgtcagccccagcaccatgccgaagcacagttcacgcacagtacgaccacgggagatgcgggcgaggaagatactcatctggatagcataaatcacccaccatgcccagtagaacacggtccagccctgcgggaagccgcctttagcgatgggatcggtatagaacaacatgcgcggcagatacatcagcaacatccccacgctatcggtgaagtagttcatgatgaagctggcaccgctgacaatgaacacccaacccagcatcaggaagctcaggtaactacgcacgtcactggcgatacgtacccctttttgcagaccgcaagcgacgcaaatggcgttgaggataatccagcaggtaatgatgatagcgtccagttgcagggtatgcggaatgccaaacaaccattgcatacactcggtcaccagcggcgtggcaaggcccagactggtacccatcgcgaagatcaaggcgacgagatagaagttgtcgacgatagtgccgaacaaccctttggcgtgtttttcacctaccagcggcaccagtgtgctgctggggcgaatcacttccattttgcggacaaagaagaagtaagcgaaggcgacactaaggaagctgtaagtggcccacggcagaggtccccagtggaacaagctgtaagccagccccaactctttcgcccctgtgctgttcggttctaagccaaacggcggggtggagatgtagtagtagatctcaatgcttccccagaacagtacggcagcagacgtacaggaggcgaacatcataaagatccaactggcggtgctaaattctggcggttcgttacctaaacgctttttggcatacgggccaaacaccagccagaaccaaccgaaaagcatcaccaccatataccattcaaatgcccatccccatacattggtgacgtaactgaatacagcattaataacgacattcgctgcatccagatctctgactgtaagccaacaaagtatgccgacgattattaacggcggaaagaaaaccttcggttctattcccgtttttctcttttcattcttcatgagttaattccactgtgaaaacgaatatttattttgcgttcccgtttgttttatttttgttaacatttaatataattattattaacctcgtggacgcgttaatggctaactcataatgggtattcaataagctgtattctgtgattggtatcacatttttgtttcgggtgaatagagggcgttttttcgttaattttgattaataatcagtttgttatgctctgttgtgagtaaaaaataacatctgactttcaatattggtgatccataaaacaatattgaaaatttctttttgctacgccgtgttttcaatattggtgaggaacttaacaatattgaaagttggatttatctgcgtgtgacattttcaatattggtgattaaagttttatttcaaaattaaagggcgtgatatctgtaattaacaccaccgatatgaacgacgtttccttcatgatttctggagatgcaatgaagattattacttgctataagtgcgtgcctgatgaacaggatattgcggtcaataatgctgatggtagtttagacttcagcaaagccgatgccaaaataagccaatacgatctcaacgctattgaagcggcttgccagctaaagcaacaggcagcagaggcgcaggtgacagccttaagtgtgggcggtaaagccctgaccaacgccaaagggcgtaaagatgtgctaagccgcggcccggatgaactgattgtggtgattgatgaccagttcgagcaggcactgccgcaacaaacggcgagcgcactggctgcagccgcccagaaagcaggctttgatctgatcctctgtggcgatggttcttccgacctttatgcccagcaggttggtctgctggtgggcgaaatcctcaatattccggcagttaacggcgtcagcaaaattatctccctgacggcagataccctcaccgttgagcgcgaactggaagatgaaaccgaaaccttaagcattccgctgcctgcggttgttgctgtttccactgatatcaactccccacaaattcctagcatgaaagccattctcggcgcggcgaaaaagcccgtccaggtatggagcgcggcggatattggttttaacgcagaggcagcctggagtgaacaacaggttgccgcgccgaaacagcgcgaacgtcagcgcatcgtgattgaaggcgacggcgaagaacagatcgccgcatttgctgaaaatcttcgcaaagtcatttaattacaggggatgctatgaacacgttttctcaagtctgggtattcagcgataccccttctcgtctgccggaactgatgaacggtgcgcaggctttagctaatcaaatcaacacctttgtcctcaatgatgccgacggcgcacaggcaatccagctcggcgctaatcatgtctggaaattaaacggcaaaccggacgatcggatgatcgaagattacgccggtgtcatggctgacactattcgccagcacggcgcagacggcctggtgctgctgccaaacacccgtcgcggcaaattactggcggcaaaactgggttatcgccttaaagcggcggtgtctaacgatgccagcaccgtcagcgtacaggacggtaaagcgacagtgaaacacatggtttacggtggtctggcgattggcgaagaacgcattgccacgccgtatgcggtactgaccatcagcagcggcacgttcgatgcggctcagccagacgcgagtcgcactggcgaaacgcacaccgtggagtggcaggctccggctgtggcgattacccgcacggcaacccaggcgcgccagagcaacagcgtcgatctcgacaaagcccgtctggtggtcagcgtcggtcgcggtattggcagcaaagagaacattgcgctggcagaacagctttgcaaggcgataggtgcggagttggcctgttctcgtccggtggcggaaaacgaaaaatggatggagcacgaacgctatgtcggtatctccaacctgatgctgaaacctgaactgtacctggcggtggggatctccgggcagatccagcacatggttggcgctaacgcgagccaaaccattttcgccatcaataaagataaaaatgcgccgatcttccagtacgcggattacggcattgttggcgacgccgtgaagatccttccggcgctgaccgcagctttagcgcgttgatccactctggcagggctgcattttggccctgccgctgacagggagctcttatgtccgaagatatctttgacgccatcatcgtcggtgcagggcttgccggtagcgttgccgcactggtgctcgcccgcgaaggtgcgcaagtgttagttatcgagcgtggcaattccgcaggtgccaagaacgtcaccggcgggcgtctctatgcccacagtctggaacacattattcctggtttcgccgactccgcccccgtagaacgcctgatcacccatgaaaaactcgcgtttatgacggaaaagagtgcgatgactatggactactgcaatggtgacgaaaccagcccatcccagcgttcttactccgttttgcgcagtaaatttgatgcctggctgatggagcaggccgaagaagcgggcgcgcagttaattaccgggatccgcgtcgataacctcgtacagcgcgatggcaaagtcgtcggtgtagaagccgatggcgatgtgattgaagcgaaaacggtgatccttgctgatggggtgaactccatccttgccgaaaaattggggatggcaaaacgcgtcaaaccgacggatgtggcggttggcgtgaaggaactgatcgagttaccgaagagcgttattgaagaccgttttcagttgcagggtaatcagggggcggcttgcctgtttgcgggaagtcccaccgatggcctgatgggcggcggcttcctttataccaatgaaaacaccctgagcctggggctggtttgtggtttgcatcatctgcatgacgcgaaaaaaagcgtgccgcaaatgctggaagatttcaaacagcatccggccgttgcaccgctgatcgcgggcggcaagctggtggaatattccgctcacgtagtgccggaagcaggcatcaacatgctgccggagttggttggtgacggcgtattgattgccggtgatgccgccggaatgtgtatgaacctcggttttaccattcgcggtatggatctggcgattgccgccggggaagccgcagcaaaaaccgtgcttagtgcgatgaaaagcgacgatttcagtaagcaaaaactggcggaatatcgtcagcatcttgagagtggtccgctgcgcgatatgcgtatgtaccagaaactaccggcgttccttgataacccacgcatgtttagcggctacccggagctggcggtgggtgtggcgcgtgacctgttcaccattgatggcagcgcgccggaactgatgcgcaagaaaatcctccgccacggcaagaaagtgggcttcatcaatctaatcaaggatggcatgaaaggagtgaccgttttatgacttctcccgtcaatgtggacgtcaaactgggcgtcaataaattcaatgtcgatgaagagcatccgcacattgttgtgaaggccgatgctgataaacaggcgctggagctgctggtgaaagcgtgccccgcaggtctgtacaagaagcaggatgacggcagtgtgcgcttcgattacgccggatgtctggagtgcggcacctgtcgcattctggggctggggagcgcgctggaacagtgggaatacccgcgcggcacctttggtgtggagttccgttacggctgatgttggtttgatacgtaacgccgcactgactctcattgcaaaaaacaggaataaccatgcaaccgtccagaaactttgacgatctcaaattctcctctattcaccgccgcattttgctgtggggaagcggtggtccgtttctggatggttatgtactggtaatgattggcgtggcgctggagcaactgacgccggcgctgaaactggacgctgactggattggcttgctgggcgcgggaacgctcgccgggctgttcgttggcacaagcctgtttggttatatttccgataaagtcggacggcgcaaaatgttcctcattgatatcatcgccatcggcgtgataagcgtggcgacgatgtttgttagttcccccgtcgaactgttggtgatgcgggtacttatcggcattgtcatcggtgcagattatcccatcgccaccagtatgatcaccgagttctccagtacccgtcagcgggcgttttccatcagctttattgccgcgatgtggtatgtcggcgcgacctgtgccgatctggtcggctactggctttatgatgtggaaggcggctggcgctggatgctgggtagcgcggcgatcccctgtttgttgattttgattggtcgattcgaactgcctgaatctccccgctggttattacgcaaagggcgagtaaaagagtgcgaagagatgatgatcaaactgtttggcgaaccggtggctttcgatgaagagcagccgcagcaaacccgttttcgcgatctgtttaatcgccgccattttccttttgttctgtttgttgccgccatctggacctgccaggtgatcccaatgttcgccatttacacctttggcccgcaaatcgttggtttgttgggattgggggttggcaaaaacgcggcactagggaatgtggtgattagcctgttctttatgctcggctgtattccgccgatgctgtggttaaacactgccggacggcgtccattgttgattggcagctttgccatgatgacgctggcgctggcggttttggggctaatcccggatatggggatctggctggtagtgatggcctttgcggtgtatgcctttttctctggcgggccgggtaatttgcagtggctctatcctaatgaactcttcccgacagatatccgcgcctctgccgtgggcgtgattatgtccttaagtcgtattggcaccattgttagcacctgggcactaccgatctttatcaataattacggtatcagtaacacgatgctaatgggggcgggtatcagcctgtttggcttgttgatttccgtagcgtttgccccggagactcgagggatgagtctggcgcagaccagcaatatgacgatccgcgggcagagaatggggtaaattgttcagatttctctcttttctgaatcaatattattgactataagccgcgtgaatatatgactacactttgtgggaaaacaaaggcgtaatcacgcgggctacctatgattcttataatttatgcgcatccgtatccgcatcattcccatgcgaataaacggatgcttgaacaggcaaggacgctggaaggcgtcgaaattcgctctctttatcaactctatcctgacttcaatatcgatattgccgccgagcaggaggcgctgtctcgcgccgatctgatcgtctggcagcatccgatgcagtggtacagcattcctccgctcctcaaactttggatcgataaagttttctcccacggctgggcttacggtcatggcggcacggcgctgcatggcaaacatttgctgtgggcggtgacgaccggcggcggggaaagccattttgaaattggtgcgcatccgggctttgatgtgctgagccagccgctacaggcgacggcaatctactgcgggctgaactggctgccaccgtttgccatgcactgcacctttatttgtgacgacgaaaccctcgaagggcaggcgcgtcactataagcaacgtctgctggaatggcaggaggcccatcatggataattaaggaatggcaggaggcccatcatggatagccatacgctgattcaggcgctgatttatctcggtagcgcagcgctgattgtacccattgcggtacgtcttggtctgggaagcgtacttggctacctgatcgccggctgcattattggcccgtgggggctgcgactggtgaccgatgccgaatctattctgcactttgccgagattggggtggtgctgatgctgtttattatcggcctcgaactcgatccacaaaggctgtggaagctgcgtgcggcagtgttcggctgtggcgcattgcagatggtgatttgcggcggcctgctggggctgttctgcatgttacttgggctgcgctggcaggtcgcggaattgatcggcatgacgctggcgctctcctctacggcgattgccatgcaggcgatgaatgaacgcaatctgatggtgacgcaaatgggtcgcagtgcctttgcggtgctgctgttccaggatatcgcggcgatcccgctggtggcgatgattccgctactggcaacgagcagtgccagcacgacgatgggcgcatttgctctcagcgcgttaaaagtggcgggtgcgctggtgctggtggtattgctggggcgctatgtcacgcgtccggcgctgcgttttgtagcccgctctggcttgcgggaagtgtttagtgccgtggcgttattcctcgtgtttggctttggtttgctgctggaagaggtcggcttgagcatggcgatgggcgcgtttctggcgggcgtactgctggcaagcagcgaataccgtcatgcgctggagagcgatatcgaaccatttaaaggtttgctgttggggctgtttttcatcggtgttggcatgagcatagactttggcacgctgcttgaaaacccattgcgcattgtcattttgctgctcggtttcctcatcatcaaaatcgccatgctgtggctgattgcccgaccgttgcaagtgccaaataaacagcgtcgttggtttgcggtgttgttagggcagggcagtgagtttgcctttgtggtatttggcgcggcgcagatggcgaatgtgctggagccggagtgggcgaaaagcctgaccctggcggtggcgctgagcatggcagcaacgccgattctgctggtgatcctcaatcgccttgagcaatcttctactgaggaagcgcgtgaagccgatgagatcgacgaagaacagccgcgcgtgattatcgccggattcggtcgttttgggcagattaccggacgtttactgctctccagcggggtgaaaatggtggtactcgatcacgatccggaccatatcgaaaccttgcgtaaatttggtatgaaagtgttttatggcgatgccacgcggatggatttactggaatctgccggagcggcgaaagcggaagtgctgattaacgccatcgacgatccgcaaaccaacctgcaactgacagagatggtgaaagaacatttcccgcatttgcagattattgcccgcgcccgcgatgtcgaccactacattcgtttgcgtcaggcaggcgttgaaaagccggagcgtgaaaccttcgaaggtgcgctgaaaaccgggcgtctggcactggaaagtttaggtctggggccgtatgaagcgcgagaacgtgccgatgtgttccgccgctttaatattcagatggtggaagagatggcaatggttgagaacgacaccaaagcccgcgcggcggtctataaacgcaccagcgcgatgttaagtgagatcattaccgaggaccgcgaacatctgagtttaattcaacgacatggctggcagggaaccgaagaaggtaaacataccggcaacatggcggatgaaccggaaacgaaacccagttcctaataaagagtgacgtaaatcacactttacagctaactgtttgtttttgtttcattgtaatgcggcgagtccagggagagagcgtggactcgccagcagaatataaaattttcctcaacatcatcctcgcaccagtcgacgacggtttacgctttacgtatagtggcgacaattttttttatcgggaaatctcaatgatcagtctgattgcggcgttagcggtagatcgcgttatcggcatggaaaacgccatgccgtggaacctgcctgccgatctcgcctggtttaaacgcaacaccttaaataaacccgtgattatgggccgccatacctgggaaagtatcggtcgtccgttgccaggacgcaaaaatattatcctcagcagtcaaccgggtacggacgatcgcgtaacgtgggtgaagagcgtggatgaagccatcgcggcgtgtggtgacgtaccagaaatcatggtgattggcggcggtcgcgtttatgaacagttcttgccaaaagcgcaaaaactgtatctgacgcatatcgacgcagaagtggaaggcgacacccatttcccggattacgagccggatgactgggaaagcgtattcagcgaattccacgatgctgatgcgcagaactctcacagctattgctttgagattctggagcggcggtaattttgtatagaatttacggctagcgccggatgcgacgccggtcgcgtcttatccggccttcctatatcaggctgtgtttaagacgccgccgcttcgcccaaatccttatgccggttgctcggctggacaaaatactgtttatcttcccagcgcaggcaggttaatgtaccaccccagcagcagccggtatccagcgcgtatataccttccggcgtacctttgccctccaggcttgcccagtgaccaaaggcgatgctgtattcttcagcgacagggccaggaatcgcaaaccacggtttcagtggggcaggggcctcttccgggctttctttgctgtacatatccagttgaccgttcgggaagcaaaaacgcatacgggtaaaagcgttggtgataaaacgcagtcttcccagcccccgcaattccggactccagttatttggcatatcgccgtacatggcatcaagaaagaagggataggagtcactgcttagcaccgcttctacatcgcgtgcgcactctttggcggtctgcagatcccactgcggcgtgatccctgcgtgggccatcaccagctttttctcttcgtcgatttgcagcagaggctggcgccgcagccagttaagcagctcgtcggcatccggcgcttccagcagcggtgtcaggcgatctttcggtttattgcggctgatcccggcaaataccgccagcagatgcagatcgtgattgcccagcaccagacgtacgctgtcgcctaaggatttcacatagcgcagaacatccaggctacccggcccgcgcgcgaccagatcgcccgtcagccagagggtatctttcccaggggtaaattctactttatgcagcaatgcgatcagttcatcgtaacaaccatgaacgtcgccaataaggtatgtcgccatattcttttaatgaatgagtgtgggaacggcgagtcggaatacgggaatgtcgatgctgaaagggacgccattttcatcgatcatttcgtagtgaccctgcatggtgcccagcggggtttcaatgattgcaccgctggtgtactggtactcttcgccaggcgcgataagtggctggacgccaaccactccttcgccctggacttcggtttcacggccattgccattggtgatcagccagtaacgccccaacaactgcactggcgctcgccccagattgcgtatggttacggtataagcaaaaacgtaacgttcattatcaggactagattgagcctcaatgtagacgctttgaacctgaatacacactcgggggctattgatcatcgttaactctcctgcaaaggcgcgttctccgccagatagttcgccatctggcaatattgcgcgacagagatattttccgctcgcatcgccgggtcgatccccattcccgttaacacctcgacgctaaacaggttgccgaggctgttacgaatggttttacgacgctggttaaaggcttcggtggtgatgcggctcaacacacgaacatctttaaccgggtgaggcatcgttgcatgaggaaccaggcgcacgacggcggaatccactttgggtggtggtgtaaaggcactcggcggtacttccagtaccgggatcacattgcaatagtattgcgccatgacgcttaatcgaccatacgctttgctgttcggtcctgcaaccagacgattcaccacctctttttgcaacataaagtgcatgtcggcaatggcatcagtatagctaaacagatggaacatcaacggcgtggagatgttataaggcaggttgccgaaaacacgcagcggctgacccattttctcggccagttcaccaaagttaaaggtcatcgcatcctgctgataaatcgtcagtttcgggcctaagaatggatgcgtttgcagacgtgccgccagatcgcggtcaagttcgatgaccgtcagctggtccagacgttcgccgaccggttcggtcaatgccgccagaccggggccgatttcgaccatcgcctggcccttttgcgggttaatggcagacacaatactgtcgatcacgaactgatcgttgagaaagttttgcccgaagcgtttacgggctaagtggccctggtggactcgattattcattgggtgttaacaatcattttgatggcgagattaagcgccgtaataaaactgccggcatcggctttgccacgtcccgccagttcaagcgcggtgccgtggtccacacttgtgcgaataaagggcaggcccagcgtaatgttcacaccgcgcccgaagccctggtattttagcacgggaagaccctgatcgtggtacatcgccagcacggcgtcggcgttatcaagatatttcggctgaaacagggtatcggcaggcagcggcccgttgagtttcatcccctgcgcccgcagctcattgagcaccggaataatggtgtctatctcttccgtacccatatgaccgccttcgcccgcgtgcggattcagcccgcagaccagaatgcgcggttcggcaataccaaatttggtccgcaaatcgtgatgcaaaatagcaatcacttcgtgcaaaagtgcaggggtgatagcgtctgcgatatcgcgcagcggtaaatgcgtcgttgccagcgccacgcgaagttcttcggtcgccagcatcatcaccacctttttcgcctggctacgctcttcgaaaaactcggtatgaccggtaaaaggaatgccagcgtcgttaataacgcctttatgcaccggacctgtgatcagcgcggcaaattcgccgttcagacaaccatcgcacgctcgcgccagcgtttccaccacataatgcccattttcaaccgctaactgccccgcagtgacaggtgcacgtagcgcgacaggaagtagcgttaatgtgcccgcagtttgcggttgtgcaggggagttgggggaataagggcggagggtgagcggcaaaccgagcatcgctgcccggttggtaaggagagtggcatcggcacaaacaaccagttcgaccggccactcacgctgtgcaagctggacaactaagtccgggccaatcccggcgggctcgccgggagtgatcacaacacgttgggttttaaccattagttgctcaggattttaacgtaggcgctggcacgttgttcctgcatccagcttgctgcttcttcgctgaacttacggttcatcagcatgcggtatgcacgatctttctgcgcagcgtcggttttatcgacattacgggtatccagcagttcgattaaatgccagccgaaactagagtgaaccggtgcactcatttgacctttgttcaggcgagtcagggcgtcacggaaggccggatcgaaaatatctggtgtagcccagccgagatcgccgccctggttagcagagcctggatcctgagagaactctttcgctgcggcagcaaaagtcgttttaccactcttgatatcagcagcaatctgttccagtttcacacgggcctgttcgtcagtcatgatcgggctcggtttcagcagaatatggcgagcatgaacttcggtcacgctgatatttttgctttcgccgcgcaggtcgttaactttcagaatatggaagccaacgccggaacgaatcgggccaacaatgtcgcctttcttcgcggtgcttaatgcctgggcgaagatcccgggcaactcctgaatacggccccagcccatctggccgccgttcagcgcctgctggtcggcagaatgagcaatcgccagcttaccgaaatcagcgccgttacgcgcctgatcgacaatggcgcgcgcctggctttccgcttcgttcacctgatcagaggtcgggttttccggcagcgggatcaggatgtggctcaggttcagctcagtgctggcgtcgttttggttacccacctgctgcgccagggattcgacttcctgcggcaggatggtgatgcgacgacgcacctcgttgttacgcacttcagagataatcatctctttgcggatctggttacgataggtgttgtagttcagtccatcgtaagccagacggctgcgcatctgatccagcgtcatgttgttctgtttcgcgatgttagcaatcgcctgatccagctgctcatcggagattttcactcccattttctgccccatctgcaggatgatttgatccatgatcaaacgttccatgatttggtggcgcagcgtcgcgtcatcaggaagttgctgccttgcctgagcagcgttcagttttacgctctgcattaatccatcaacgtcgctttccagcacgacgccgttattgacgacggctgcgactttatcgactacctggggggcagcgaaactggtattcgcgatcatggcgataccgagaagcagcgttttccagttcttcatactttttccatttcaattaaccgcactgcggattacgtggtaaatcaacaaatcacaaagtgttttgatacggcagaatgttgctacgcagcatctcttgcgtacccagaccgtagttggagctcaggccgcgaagttcgatgttaaagccgattgcgttgtcatataccgcatgttgtttatcgttatcccaaccgttcagcttccgctcgtaaccgacgcgaattgcatagcagcaggagctgtattgcacacctaacatagagtcggcttgcttgttagcattggtgtcgtagtagtaggccccaacaatggaccaacgatcggcaattggccagctggcgacagcacctacctggctaataccattcttatattgctcagcagtggaatagtacttaggcagcgtagcctgaatatattccgggctggcgtaacggtaattcagctgtaccagacggtcttcatcccgacggtattcaatgctggagttactggtcgctacgttatccagacgtgtatcgtactgaatcccgccacgcaatccccaacgctcggagatacgccagtaagtatcgcctgcccacaccagactacccgttttgtcgtcattctcccatgttatgttgtcatcgccagtgcgagactccgtgaaatagtagatttgaccaacggaaatattaaaacgttcaacggcagcatcatcatatatgcgagatgtgacaccggtcgtcacctggttagcggaggcaatacggtcaagaccgccgtaagtccggtcccggaacaggccagagtagtcagattgcagcagagagctgtcgtagttatagatgtcgctctgatcgcgatacggcacgtacaaatactgcgcgcgcggttccagcgtttgggtataacccggagccagcatttccatatcgcgttcaaagaccattttgccgtcaactttgaattgcggcattacgcggttaacggattcgtccagcttggtcgtgtttctggagttataccagtcaagattggtttgctgataatgggttgccagcaacttcgcttcggtattgatgctgccccagttattagagagcggcaaattgatggtcggttccaggtgaacacgggttgcttcaggcatgtcgtctctggtgttaacaaagtgcactgcctggccgtaaatacgcgtatcaaacggaccaacatcattctggtagtaattaacgtctaactgcggctctgcgctgtagctactggtgttctgttcgctgaaaacctggaactgcttggtactaacggtggcattgaagttttgcaccgcatagccaacgctgaatttttgcgttgcgtagccgtcagtactggaaccgtacttgttatcgaaatcattgaagtagctaggatcgctgaccttggtgtagtcgacgttgaaacgccacacctgatccatgaccccggagtggttccagtagaataaccaacgacgactactgtcatcgttcgggtgttcatcttcatagactttatcactaggcagatagtccagttccatcaagccagcgcccgcctgggagaggtagcggaattcgttctcccacatgatgttgccacgacgatgcatataatgcggcgtgatggtggcatccatatttggcgcgatgttccagtaatatggcaggtagaactcaaagtagttggtggtggtgtacttggcgttcgggatcaagaaaccagagcgacgtttgtcacccaccggcaactgcaaataggggctataaaagatcggtaccggacccaccttaaagcgggcgttccagatctccgcaacttgttcttcgcggtcatgaataatttcgctacctaccacgctccaggtgtcagaacccggcagacaggaggtaaagctaccgttatccagaatggtatagcggttttcgccacgttgtttcatcaggtccgctttaccgcgaccctggcgacccaccatctggtaatcaccttcccagacgttggtatctttggtgttcagattcgcccagcctttcggccctttgaggatcacctggttatcgtcgtaatggacattaccgagcgcatcaacggtacgtaccggctccggttgtcctggtgcctctttttgatggagctgcacttcgtcggcctgcagacggctgttaccctgcatgatatccacgctgccagtaaacacggcgtcatccgggtagtcccctttcgcgtggtcagcattgatagtcacgggtaagtcattggtatcgccctgtaccagaggacggtcatagcttggcacgcccaacatgcactgactggcgaggtcggctgccagtccctgttgactataaagggcggtggcaatcatggtggccaggagagtggggatacgttttttcatacgttgattttattgttccatcatcggtaacgttgcgcgtgacaaacggtcagagactaacgtactcgtcatctctacgctagtgttaatcctgtccgaatagcgtcagtggtgttaggcacggcattgaatgacaggtatgataatgcaaattataggcgatgtcccacaattgaccgcagccggaaaacggtaaaagcacctttatattgtgggagatagccctgatatccgtgtgtcgatttggggaatatatgcagtattggggaaaaatcattggcgtggccgtggccttactgatgggcggcggcttttggggcgtagtgttaggcctgttaattggccatatgtttgataaagcccgtagccgtaaaatggcgtggttcgccaaccagcgtgagcgtcaggcgctgttttttgccaccacttttgaagtgatggggcatttaaccaaatccaaaggtcgcgtcacggaggctgatattcatatcgccagccagttgatggaccgaatgaatcttcatggcgcttcccgtactgcggcgcaaaatgcgttccgggtgggaaaaagtgacaattacccgctgcgcgaaaagatgcgccagtttcgcagtgtctgctttggtcgttttgacttaattcgtatgtttctggagatccagattcaggcggcgtttgctgatggtagtctgcacccgaatgaacgggcggtgctgtatgtcattgcagaagaattagggatctcccgcgctcagtttgaccagtttttgcgcatgatgcagggcggtgcacagtttggcggcggttatcagcagcaaactggcggtggtaactggcagcaagcgcagcgtggcccaacgctggaagatgcctgtaatgtgctgggcgtgaagccgacggatgatgcgaccaccatcaaacgtgcctaccgtaagctgatgagtgaacaccatcccgataagctggtggcgaaaggtttgccgcctgagatgatggagatggcgaagcagaaagcgcaggaaattcagcaggcatatgagctgataaagcagcagaaagggtttaaatgaccctgtaaatgatgctgagtaactgcccacgattaaaggtggccgccctggcggtcacttctttgagaaaaggcgtttactcagaatggtggacaggctcaatgcacgatttacgggaggggttctgtaggttttatcgcgttgaccctgcttaaggttgagagctttacgacgagcggaattatatttttacgtcttaaaaataaaaaacacatacctgaatgagcgatttttgaaagtatatttattcagaacgcgcatcatgagtttttaactcaatgcgaggctattaccatgaaagtaagtgttccaggcatgccggttacacttttaaatatgagcaagaacgatatttataagatggtgagcggggacaagatggacgtgaagatgaatatctttcaacgcttgtgggagacgttacgccatctgttctggagtgataaacagactgaggcttataaacttctgttcaatttcgtgaataaccagactggcaacatcaacgccagtgaatactttactggggctatcaacgagaatgagagagaaaagtttatcaatagcctggaattattcaataaacttaaaacatgcgcaaaaaatccggatgagttggtcgcaaagggcaatatgcgctgggtcgcccagaccttcggggatatcgagttaagtgtcactttttcattgaaaagaataagatatgtactcagacgttgcagctgcataagggccaaggtaacttgggcgttgatcttagaaaggcttaccttcccggcgttgacatgagggattgttaccttggtaaaaaaacaatgaaaggtagcaatgatatcctttatgagagacctgggtggaatgctaacctgggcgtgctaccccggacggtgctaccccggacggtgctaacccggacggtgctaacctggacggtgctaccgtgaacggtgctacctccttatatgatgaggtaattattattaataaaatcccccccaaaaaaattgatactaaaggagttgctactgaagaagttgctactaaaaaagtactgctgaacaaattactgacaacgcaattattgaatgagccagaataagctaaggttgaaggggctggaacgccccttcaaccttagcagtagcgtgggatgatttcacaattagaaagacctgcatgatgagctagagaagaggctagtgacgcaaggcgtcgtgcaggacacggatcaccgagatgggcatcgccaaccagactgctaattagcccatgaataacaatcagaaaggaccataacagacccgttaaaatgaaatataagagacggtcaacgggtgaagaaaaagttcaaaaattcgctgtggagcaggaagggaattaccgaatggaaagcgtagccacacgcaacaactgaaagcagtttggcagaaacaaaaaatccccggactcggggatttatgtacaagaggcagcccttaggatgagggtataaacgtacaggaaaggttaaaaatccgctggcgctttaaacgtcatactattgccatacgccggatgggtaatcgtcaacatctctgcatgtagcaacaaacgtggtgccatcgctctcgcttctggacttgcataaaaacgatcgccgagaatcggatgacccagcgccagcatatgcacacgcaattgatggctacgcccggtaatcggttttaacaccactcttgccgtgttatccgccgcatactccaccacttcatattccgtctgcgcaggtttacccgtttcgtaacagactttctgtttcgggcggtttggccagtcgcaaatcagcggcagatccaccagaccttctgcgggggatggatgcccccagacgcgggccacatactgctttttcggctcgcgctcgcggaactggcgttttaactcccgctccgcggctttggtcagcgccactacaatcacgccgctggtagccatatccagacgatgcacgctttctgcctgcggataatcacgctgaatgcgcgtcatcacgctgtctttgtgctcttccagacgacccggcacactcaacaaaccgctcggcttgttgaccaccataatatggtcatcctgatacaggataaccaaccagggttcctgcggtggattgtagttttccatccccattttcggctccgttactgatgcgttacaacgatcaaacgcagggcatccagacgccaacctgcctgatccaggctttccattacctgctgacggttgctctcaatggcggtcagttcgtcgtcacgaatgttcgggttcactgcacgcagagcttccagacgagacagctcggcagacagtttttcgtcggcttcgttacgcgctgcatcaatcaatgcacgggcagatttctcgatctgcgattcacccagttgaaggatagcgtgaacatcctgctgcacggcgttaaccagtttgctgccggtgtgacggttaaccgcgttaagctggcggttaaaggtttcaaactctacctgcgccgccaggttgttgccgtttttatccagcagcatacgtaccggcgtcggtggcaggaagcggttgagctgcaactgcttcggagcctgggcttcaaccacataaatcagttccaccaacagcgtacctaccggcaacgctttgttttttaacagactaatcgtgctgctaccggtatcgccagaaaggatcagatccagaccgttgcggatcagcggatgctcccaggtaataaactgtgcatcttcacgcgccagcgccacttcacgatcaaaggtgatggtgatgccatcttcgctcaggccagggaagtccggcaccagcatatgatcggacggcgtcagcacgatcatgttgtcgccgcgatcgtcctgattgataccgataatatcgaacaggttcatggcgaaggcgatcaggttggtatcgtcatcctgctcttcaatgctttctgccagtgcctgggctttttcgccaccgttggagtggatttccagcaggcggtcacgaccctgttccagctgtgctttcagcgtttcatgttgctcgcggcagtttttgatcagatcgtcaaagccttcggtttgatccggactagccagatagttaatcagatcgttgtatacgctatcgtaaatagtgcgtccggtcgggcaggtgtgctcaaatgcatccagaccttcgtgataccagcgcaccagcacgctctgagcggttttctccagataaggcacatggatctgaatatcgtgcgcctggccgatacgatccagacgaccaatacgctgctccagtagatccgggttgaatggcaggtcaaacatcaccatgtggctggcgaactggaagttacgtccttcagaaccgatttcactgcacagcagtacctgtgcgccggtgtcttcttcggcaaaccaggcggcagcgcggtcacgttcgataatgctcataccttcgtggaacaccgcagcgcgaataccttcacgttcgcgcagtacctgctccagttgcagcgcagtggcagctttggcgcagatcaccagcactttctgagagcgatggctggtcaggtagcccatcagccactcaacgcgcggatcgaagttccaccaggtggcgttatcaccttcaaattcctgataaatacgctccgggtagagcatatcgcgagcacgatcttccgcacttttacgtgcgcccataatgccggagactttaatagccgtctgatactgcgtcggtagcggcagcttaatggtgtgcagctcgcgtttcgggaatcctttcacaccgttacgcgtgttacggaacagcacgcggctggtgccgtggcgatccatcagcatgctaaccagctcctgacgggcgctctgggcatcttcgctgtcgctgtttgctgcctgcaacagcggctcgatatcctgctcgccgatcatctcgccgagcatgttcagttcgtcattgctcagtttgttacctgccagcagcatggcaacggcgtccgcaaccggacgataatttttctgctcttcaacgaactgcgcaaaatcgtggaaacggttcgggtccagcagacgcagacgggcgaagtggctttccatccccagctgttccggggtcgcggtcagcagcagaacgcccggcacgtgctctgccagttgttcaatggcctgatattcacggcttggcgcatcttcgctccacaccaggtgatgcgcttcatcgaccaccagcaggtcccattcggcttcacagagatgttccaggcgctgtttgctacgacgggcaaaatccaggctgcaaatcaccagctgttcggtgtcaaacgggttgtaagcatcgtgctgagcttcggcataacgctcatcatcaaatagcgcaaagcgcaggttgaaacggcgcagcatttctaccagccactgatgctgtaaggtttccgggacgataattagcacacgttcagcagcgccagagagcagttgctgatgcaggatcatcccggcttcaatggttttccctaaacccacttcgtcagccagcaggacgcgcggcgcgtggcggcgaccaacatcatgagcgatgttgagctgatgcgggatcaggctggtacgctgaccgcgcaggccgctgtacggcatacggaactgttcgctggaatatttacgcgcgcgataacgcagcgcaaagcggtccatacggtcaatctgcccggcaaacagacggtcctgcggtttgctgaacaccagtttgctatcaaggaaaacttcacgcagggctacgccggactcttcagtatccaggcgagtaccgatataggtcagcaagccattttcttcttttacttcttcgacttgcatctgccagccgtcatggctggtaatggtatcaccagggttgaacatcacgcgggtcacgggggaatcactgcgtgcgtacagacggttttcaccagtagatgggaaaagtaaagtgacagttcgcgcatccaccgcgacaacggttccaagtcccaattcgctttctgtatcgctgatccagcgttgaccaagtgtaaaaggcatatgtgttcggctctatatctttaattgcaggcaataaccacccgctaccgtgcttatgaggtagtggtgttattcaggtccaggaatggaaagggcgctatggtactggatggcaaagcattcgtcacgcatcaaaatggtatctggcgaactcttttttttgctcaaaatagcccaagttgcccggtcataagtgtagcaaaattatcctcaataaaagggagtattccctccgccacgggttgtagctggcgggtcagatagtgttcgtaatccagtggactacgttggtagtccagcggctccgggccgttggtggtccatacgtacttaatggtgccgcgattctgatattgcaaggggcgaccacgcttttggttttcttcatcggcaaggcgagcggcgcgtacatgaggcggcacattacgctgatactcgctcagcggacggcgaaggcgtttacggtaaaccagtcgcgcatccagttcacccgccatcagtttgtcgatggtttcgcgtacatattcctgatatggctcgttgcggaagatgcgcaggtatagctcctgctgaaactgctgggccagcggcgtccagtcggtgcgcacggtttccagccctttaaacaccatccgctgcttgtcgccctcctgaatcagtccggcataacgctttttactgccggtatcggctccgcgaatggttggcatcagaaaacggcagaaatgggtttcatactccagttctaatgcgctggtcagccgttgtttttgcagcgtttccgcccaccaggcgttaacgtgctgcaccagtgcacgaccgattttcgccgcttcttcttcgctatgtgcgcctttcagccagacaaacgtactgtcggtatcgccgtagataacgtcgtagccctgtgcttcaatcaacgctttggtttgccgcatgatctgatgaccacgcatggtgatgctgcttgccagccgcggatcgaagaagcggcaggcggtggtgccgagcacgccataaaaggcattcatgatgattttcagcgcctggctcagcggtttgttaccctggcgtttggcttcatcgcgcccgtgccagatgttagtcacaatctccggcaggcaatgtttttctcggctgaaccaggcatcgagaaaaccttcggtactgtgctctggatcaggctgcgccatgccttccaccagcccgacgggatcaatcagaaaggtgcggatgatgctcgggtacaggcttttatagtccagcaccagcacactatcataaagccctggccgactatccatcacgtagccgccagggctggcgtgcggcggcacttcgccgagattaggcgcgacataaccagcgcgatgcattcgcggaaaatagagatgaccaaatgccgccacgctaccgccgtgtcggtccaccggcaggccgttcaccgttgcccgttcgagtaaaaatggcatgatttcagttttgtggaagatctgcgtcaccagctcgcaatctttcaggttataagttgccagcgcaggtttatcttcggcgaaacggcggtcaatttcgtccattcgatcccacgggttatcgatagattttccttcgcctaatagctcctgagcgacagtttccaggctgaaactagagaaattccagaacgcggatttcagcgcctcgataccgtcgataattagccgacctttagcctgggcaaaaaagacgccgtttttaaagccgtgctcgcgccactccagctcgctattatcgcgcccaagacgcagcggaagacggtaacgctcggcatgtttttgcagcattcgcagatcgaactgcaccacgttccaaccgatgatcacatcaggatcgtagttggcaaaccaggcgttgagtttttccagcaactgcgggcggctggcgacgtattccagttcgaaatcaaggctggaggcgtcgccattctccggccccagcatataaacgatgcgctgcccgcagccttccaggccgatgcagtacagctcaccgtggcgggtggtttcaatatctatagaaacccacttgagcggcggacgatagtcgggatgcggtttcagacgggcattaacgatagtgccattgtgcatatcaccctcgacccacaccggactggtgataaaccgctccatcagatagcgttctggcggacgcacatcggcctcgtagacggtaacgccaccttcacgcaggcgcttttcgtaattcatcaattggcgatgggcgcgacagtaaaggccatacaccggctggcggtgaaaatcctttaacgccagcggtgtcaggcgaaagccttgttcaccctgcaaaatatgctgagcgcggggaacctgatcggcgggaataaacgccacggactcttgcggtgcaagcgtaacctgcaacggcccgttgtccgtcgccagccagaaggagacttctgtcccttgcggggtgtcccgccagtgtcgggttaagataaaacctgcctgcgccacgctgaaaatccatcaaaaaaccaggcttgagtatagcctggtttcgtttgattggctgtggttttatacagtcattactgcccgtaatatgccttcgcgccatgcttacgcagatagtgtttatccagcagcgtttgctgcatatccggtaactgcggcgctaactgacggcagaatatccccatataagcgacctcttccagcacgatggcgttatgcaccgcatcttcggcatttttgccccatgcaaacgggccgtgggaatggaccagaacgccgggcatttgcgctgcatcgataccctgtttttcaaaggtttctacgatgacgttaccggtttcccactcatattcgccgttgatttctgcgtcggtcattttgcgggtgcagggaatggtgccgtagaaatagtcggcgtgggtggtgccggttgctggaatgctctgacccgcctgcgcccagatggtggcgtggcggctgtgcgtatgcacaatgccgccaatggaggggaatgcctgatagagcagccggtgagttggcgtgtcggaggagggctttttcgtaccttcaaccacttcaccggtttcgatgctaaccacgaccatatcgtcagcggtcatgacgctgtaatcgacgccggaaggtttgatcacaaagacgccgcgctcgcgatcaacggcgctgacgttgccccatgtgagcgtgaccaggttgtgttttggcagcgccaggttggcttctaatacctggcgtttgagatcttctaacatgttgactccttcgtgccggatgcgctttgcttatccggcctacaaaatcgcagcgtgtaggcctgataagacgcgccagcgtcgcatcaggcgttgaatgccggatgcgctttgcttatccggcctacaaaatcgcagcgcgtaggcctgataagacgcgccagcgtcgcatcaggcgttgaatgccggatgcgctttgcttatccggcctacaaaatcgcagcgtgtaggccagataagacgcgtcagcgtcgcatcaggcgttacataccggatgcggctacttagcgacgaaacccgtaatacacttcgttccagcgcagcgcgtctttaaacgctggcaggcgtgtgtcgttatcaatcaccgtgatttcaatgtcgtgcatctcggcgaattggcgcatatcgttgaggttcagtgcatggctgaagacggtatggtgcgcgccaccagcgaggatccacgcttcggaagcagttggcagatccggttgcgctttccacagcgcattcgccaccggcagtttcggcagggagtgcggtgttttcaccgtgtcgatgcagttaaccagtagacggtaacgatcgccgagatcaatcaagctggcgacaatcgctgggccggtttgggtattgaagatcaggcgggcaggatcgtccttaccaccaataccgagatgctgaacgtcgaggatcggtttctcttctgcggcgatgctcgggcagacttccagcatatgggagccgagcaccaggtcattacctttctcgaagtgataggtgtagtcctccataaaggaggtgccgccctgcagaccggtactcatcaccttcatgatgcgaagcagggcggcagttttccagtcgccttcgcccgcaaagccgtaaccctgctgcatcagacgctgtacggccagaccaggaagctgtttcagaccgtgcaaatcttcaaaggtggtggtgaacgcgtggaagccaccttgttccaggaaacgcttcatccccagctcaatacgcgccgcttccagcacgttctgtcgttttttgccgtggatttgtgtggcaggcgtcatggtgtagcagctttcgtactcatcgaccagcgcgttaacatcgccgtcgctgatggagttcaccacctgcaccagatcgccaaccgcccaggtattgacggagaaaccgaacttgatctgtgcggcaactttatcgccatcggtgaccgccacttcacgcatgttatcgccaaatcggcagactttcagatgacgggtatcctgtttagagaccgcctgacgcatccaggagccgatacgctcatgggcttgtttatcctgccagtgaccggtaaccacggcatgttgctgacgcatacgcgcgccaatgaagccgaactcgcgaccgccatgtgcagtctggttcaggttcataaagtccatatcgatactgtcccacggcagcgccgcgttgaactgggtgtggaattgcagcaacggtttgttgagcatggtcaggccgttgatccacattttggccggggagaaggtgtgcagccacaccaccagaccagcgcaacgatcgtcgtaattcgcgtcgcggcaaatagcggtgatttcatccggcgtggtgcccagcggtttcaacaccagtttgcagggcagtttcgcttccgtattcagcgcattaacgacgtgctcggcatgttgggtgacctgacgcagggtttccgggccatacagatgctggctgccaatgacaaaccacacttcataattatcaaaaatcgtcattatcgtgtccttatagagtcgcaacggcctgggcagcctgtgccggggcggaagttggaagatagtgttgttcggcgctcatcgcccattgctgatagcggcgataaagctgttcaaagcgttgtgcctgctcgctgcacggttgcagggttttctctaccgcactggccattttttgctgagcacttgggatgtctgcgtgcactttcgcggcgacggcagcaaaaatcgccgcaccgagcgcacagcactggtcagaggcaacaatttgcagcgggcgattcagcacgtcgcagcaggcctgcataatgacctggtttttccgcgcgatgccgcccagtgccatcacgttattaacggcgatcccctgatcggtaaagcactccatgattgcgcgtgcgccaaaggcggtggcagcaatcaaaccgccgaacagcagcggagcgtcggtagcgaggttaagatcggtaatcacccctttcaggcgttggttagcgttcggtgtgcggcggccgttaaaccagtcgagcaccaccggcaggtgatccagagacggatttttggcccatgcttcggtcagcgccggaagcagttgtttctggctggcgttgatttgcgttttcagttccggatgctgggcggcaagctgttccagcggccagccgagtacgcgaccaaaccaggcgtagatatcaccaaacgcgctttggcctgcttccagaccgataaatccaggcaccacgctgccatcaacctgaccgcaaatacctttaactgcccgctcgccaacgctctgtttgtcggcaatcagaatgtcgcaggtggaagtaccgataacttttaccagtgcgttaggctgtgcgcctgcgccaactgcgcccatatggcagtcaaacgcgccgccggaaatcaccacgctttcaggcaggccgagacgctgcgcccattccgggcataaggtgcccaccggaatatcggcagtccaagtgtcagtgaacagcggggaaggcaaatggcgattgaggatcgggtccagctcatcaaagaaactggctggcggcaggccgccccagctttcgtgccacagagatttatgcccggcgctgcaacgtccgcgacgaatatcctgcgggcgggtggtaccggaaagcagagctggcacccagtcgcacagctcaatccagcttgcggcagattgcgccacggcgctgtcctggcgagtcacatgcaggatttttgcccagaaccattcgctggaataaataccaccaatgtagcgggagtagtcaacgttgcccggcgcgtggcacaaacgggtaatctcttccgcttcttcaaccgcagtgtggtctttccacaatacgaacatcgcgttcgggttttcggcaaactccgggcgcagcgccagcacgtttccgtcggcatcaatcggtgcgggcgtgctgccggtactgtcaacgccaatcccgaccacagctgcgcgctgttcgacgctaagctctgcaagcacggttttcagtgccgcttccatactctcaatgtagtcacgcggatgatgacggaactggttattcggggcatcacaaaattgccctttctgccaacggggataccactctacgctggtggcgatctcttcaccggtagcgcagtccaccgccaaagctcgcacagaatcactgccaaaatcgaggccaattgcaatcgccatcgtttcactccatccaaaaaaacgggtatggagaaacagtagagagttgcgataaaaagcgtcaggtaggatccgctaatcttatggataaaaatgctatggcatagcaaagtgtgacgccgtgcaaataatcaatgtggacttttctgccgtgattatagacacttttgttacgcgtttttgtcatggctttggtcccgctttgttacagaatgcttttaataagcggggttaccggttgggttagcgagaagagccagtaaaagacgcagtgacggcaatgtctgatgcaatatggacaattggtttcttctctgaatggtgggagtatgaaaagtatggctgaagcgcaaaatgatcccctgctgccgggatacagctttaacgcccatctggtggcgggtttaacgccgattgaggccaacggttatctcgatttttttatcgaccgaccgctgggaatgaaaggttatattctcaatctcaccattcgcggtcagggggtggtgaaaaatcagggacgagaatttgtctgccgaccgggtgatattttgctgttcccgccaggagagattcatcactacggtcgtcatccggaggctcgcgaatggtatcaccagtgggtttactttcgtccgcgcgcctactggcatgaatggcttaactggccgagtatatttgccaatacgggtttctttcgcccggatgaagcgcaccagccgcatttcagcgacctgtttgggcaaatcattaacgccgggcaaggggaagggcgctatagcgagctgctggcgataaatctgcttgagcaattgttactgcggcgcatggaagcgattaacgagagcctccatccaccgatggataatcgggtacgcgaggcttgtcagtacatcagcgatcacctggcagacagcaattttgatatcgccagcgtcgcacagcatgtttgcttgagcccgagccgtctgagtcatcttttccgccagcagttagggattagcgtcttaagctggcgcgaggaccaacgcattagtcaggcgaagctgcttttgagcactacccggatgcctatcgccaccgtcggtcgcaatgttggttttgacgatcaactctatttcagccgagtatttaaaaaatgcaccggggccagcccgagcgagtttcgtgccggttgtgaagaaaaagtgaatgatgtagccgtcaagttgagttaattggtaacgaatcagacaattgacggcttgacggagtagcatagggtttgcagaatccctgcttcgtccatttgacaggcacattatgcaagcattgctggaacactttattacccaatccaccgtgtatagtttgatggcggtggtgttggtggcctttctggagagcctggcgctggtcggtttgattctacccggtacggtgctgatggcggggctgggagcgctgattggcagcggcgagttaagtttctggcacgcctggctggcagggattattggctgcttgatgggcgactggatttctttctggctgggttggcgttttaaaaagccgttgcatcgctggagttttctgaagaaaaacaaagcactacttgataaaactgaacatgcgttgcatcaacacagcatgttcaccattctggtcggtcgttttgttggcccgacgcgtccgctggtgccaatggtggcgggaatgctggatctgccggtggctaaatttattacgccgaatattatcggctgcctgctgtggccgccgttttacttcctgccagggattctggcgggcgcggcgatcgatattcctgccggaatgcagagcggtgagtttaaatggttgctgctggcaacagcggtgtttttgtgggttggtggctggctgtgctggcggttatggcgcagcggtaaagcgactgaccgtttgagtcattatttgtcccgcggtcgtttgttgtggctgacgccgttgatttctgccatcggcgtggtggcgctggtggtgttaattcgccacccgttgatgccggtgtatatcgatattttgcgtaaagtggttggggtttaagagatagtcttgtgcgggttgcctgatgcgacgcttgccgcgtcttatcaggcctacaaaacgcactacccgtaggtcggataaggcgttcacgccgcatccgacagtgcatattaacccgtaatccccaatagtgcgctagcactcgccttaccgctcaacaactcattggtcataccctgccaggcgatgcgcccgtcggcgactactacgctgcgcgtggcgatccgcgccgcatcttccacgctgtggctcaccatcaatagcgtcattttttgctgctggcagctcgtgctcaccagcgtcaacatctcctgacgtaacgccggatcgagcgcagagaacggttcatcgagcaataaaatcggctgttcgcgtaccagacaacgcgctaacgccactcgctgtcgctgaccgccggaaagctcgcccggtaaccgcgccattaaattatcaatccccatctggcgggcgatagcgtgcattttcccctgctgtaccgcgttcagtttcaatcccggatttagccccagcccgatgttctgtgcgaccgtcaggtggctgaacaggttgttctcctgaaacagcatgctcaccggacggcgactcggcggcatagttgtgtgatctacgccatcgatagtcaggctaccgctggctggcgtcagaaaaccggcgatcaaattcagcagggtacttttacccgcgccgcttggcccgaggatcgccacctgctcgccgcgttccaccgttaagctaaaacgcatcggcaaatggtggtaaagccaggtgatatcagtcagttttaacatttcgccccggtagtttttcaatcacggtaaacagcagaaaacagagcagcagcagaattaacgcggtgaccgcaccgtcctggctgcgataggagccaatttgctggtagagataaaacggcagggtgcggaaatcatcgttaccgaacaacgccaccacgccaaaatcaccaatgctcagcacgcatgcaaaggccagcgcctgcgccagtggacgtttcagggcgcgcagctccaccacttttaagcgactccagccttcaatccccaggctctgacataacatgctgtagcgggcggtgatatcgcgcatcgggttttccagcactttcagcgcataagggatcgccattaacgcattggtgaaaatcacaatgccgtcagcagattgtggcaggccgatagtgttgttgagcagtaaaaagaagccggtagccagcacaatccccggcatggcgaggatcaacatgccgctcatctccagcacctgacccgccagcattttctgccgcgcccgcagttcgcgactgctccatagcagcatcatggtcagcactacgcacaatacacctgccgccagcgcaatacgcaagctggtccacagcgcctgccacagcaccggttgtgccagcacttccggcaactggcgatttaccccatcgacgatcaccgccagtaacggtggcagcaacagcagcagcgccagcacaattaacaccgtgtcgcaaatgcggctatgcagacgatcgtccgggtcgcgccagccttgcagcagcgtggtgccgggcgcaatggccttactcaatcgctgactcaacagcaccagcccgaggcagcacaccatctggagcagcgccagcattgccgcgcgggcaggatcgtagtcgtaactcagcgcctgatagattgccagctcgatagtggtcgcctgcggaccgccccccaggcttagcacggtggcgaagctggcgaaacagagcataaagataagcgcagcaaccggcgggatttgtcgccgtaaccacggccattcgacgaagcggaaaaaatgccagctacgcatcccaagctgggcggcaagttgacgctgttcgccggggatgttttccagtgcctggagtaataagcggctcgccatcggcagattaaaaaacacatgggccagcaaaataccttgcaggccgtaggggctaaaggtccactccagaccgaggctttggcagagtgttgccagccagccctggcgaccatagacgctaagaatgccgaaaacagcgaccaacaccgggaggatcaaggtcattgcacacagacgcaacagcgccagccgacccggaaagcgcctgcgatagagcgcgcgggcgaggaatatcgcgggtatgacagagagcagtgcgctgagaaacgcctgccagaaggagaagcgcaccacatgccacagatagctgtcctgccagactgccacccagtcatcctgcggcgcgttccaccacagggcgagaaacgccgccagcgcaaccgctaccaccagcgtggtggcgcttacacctggaattaaccagccgggaattaacggctgacggcgcgttgccattcgctaatccatgcctgacgttgtgccgccacttcggctggcgtgaactccaacgtggttgcgggtttggtcaatttttcaaaaccggcaggcagcgtgacgtttgccaccggatacatccagttgccggttgggatcgcattctggaaagccggagaaaccataaactggaggaatttttgcgccagctccggctgcttgctggcagcggtgcgggcggcgacttccacttgcagatagtgaccttcgctgaagttcgcggcggcgtagttatctttcttctcttcgagaatgtgataagccggagaggtggtgtaactcagtaccagatcgctttcaccttttaaaaacaggccgtaggcttcgctccagcctttggtgaccgtgaccgttttcttcgccagtttctgccaggcttgtggggcgtcatcgccatagactttttgcatccatagcaacagacccagccccggtgtactggtgcgcggatcctgataaatcacccgccagttttgatcgctctcaaccagttctttcaggctttgtggcgggtttttcagtttgttcttgtcataaacgaaggcgaagtagccataatcaaacggtacgaaagtgtcattattccagccgccgggaacgttaacggcatccgctgccacaccgcttttggcaaacagtccggttttactggcggcgtctaacaggttgttatccagccccagcaccacatcggctttactgtttttgccttccatccgtagacggttgagaaggctaacgccatcttccagcgccaccagtttcagttcgcaattacagtcggcttcaaaggcttttttaaccaccggaccaggcccccagtcggcggcgaaggaatcgtaggtataaacagtcagaacgggtttagcgaaaacgggcgctgtgcacagcaacagcaggggcagacatttttttaacactttgcacctcaaaaaagagtggcaaaggacttgagaaggagcctcaaatcccttcgccggcgttatccggatcaggttcgacgggtattttctcagcgcacgcgtacgcgtggcaccccgttgagaacggcgttagtgtagtgattttgttatcaaccagcaatcatggatccggtggcgcaaaccacgcacttttaaaatcgaaccagccgagggtattcatgcgcaggccgcgcatactgcgttgcccctgaatgatcagccagtggtgcaataatggcaccatcgctttgctggcgaccagttgctggcaccagttcgccagattcatctcgccattgcgccagcgagcagcgtcggcttgccagtcaatgggaatgcaatgttgtagcagtggcacttcgcataaatgtgcgaaaacagagaagtccagcggcagggtaaagttggcgctgtttagccagatatcactttcgatctctcctgtatgccactgatcgtagtcgatctctttgattttcagcgtgacctggtgacttgccagaatctgctgcatgatcccggcaatcacccgatgctcactgtgatcctgataaaaggttagggtgaggctttccaggccagccggtttttcgctctttatggtgcgggcatggtgccaacgggggagcagtccataagccgggaaccacagttgctggtactgttcctcagcgaaatagaccagattagttggagaaagcacatagcttacccagtccctgacttgctgattcgccccgcgatgggtgcggctgtcgaacagtaaatagtagcaaccttcctccaggcggctttcaatctctttttcctcgccctgtggaccttttagcatcagccctccggctggctcgtcggcaatttccggcagaacccagacgttaacttcgtcgattaatgcccggtaaccgaagaagtcatcgaatgcctgaattttcagttgattggtgctgttgcgaatcaccgcatacggaccggtgccgatgggatggctggcaaagttactgagggtttcccattcgcgcggcaggatcatcgccggaacttgccccagcagtaacggtaaccagcggtccggttgcgtgagatggatatccagcgtccagggcgtcgggctcacaatgtcagcaatatggctatagagcggcagcgtattgattcgttttaaagaggcgatcacatcgtccatttccagttcacgaccatggtgaaaatggactcctggacgcaaaaagaaacgccagtgaagcggactaatttgctgccagtggtgggcgatgtctgcttccagttccccattttcctcatttatgcgcgttaggctactgaagatttgccgggcgatatgggtttcggaacggcgcaatgcgctgccaggtagcagattacgcaacggacgatagtagagcacgcgcaggatgtgccgcccctggcggaagctgcggcccagatgagaaaccagcatttgccgcacagtcgctttgtcgccaaccaactgcaccagttgatcgatacgatcctgctccagcaggtcttccgcccgctgttgctgaagcgccagcccggtatagaggaatgtcagacggctgcgtttaccgcgcccgacttccgcttcccacgtcagccagccgcgatcctgcatggtgttgagcagggtgcgcatatgacgacggctgcagctcaataacgctgccagttcgttgagcgttgtgtcctggcttttaccctcgcagcattgccacaggcggatgaactgttgttgcagacgagcagatggcataaaaggggaactcctgtgcaaaagacagcaattttattttccctatattaagtcaataattcctaacgatgaagcaagggggtgccccatgcgtcagttttatcagcactattttaccgcgacagcgaagttgtgctggttgcgttggttaagcgtcccacaacgattaaccatgcttgaaggactgatgcagtgggatgaccgcaattctgaaagttgacttgcctgcatcatgtgtgactgagtattggtgtaaaatcacccgccagcagattatacctgctggttttttttattctcgccgcgctaaaaagggaacgtatgatctggataatgacgatggctcgccgtatgaacggtgtttacgcggcatttatgctggtcgcttttatgatgggggtggccggggcgctacaggctcctacattgagcttatttctgagtcgtgaggttggcgcgcaacctttctggatcggcctcttttatacggtgaatgctattgctgggatcggcgtaagcctctggttggcaaaacgttctgacagtcagggcgatcggcgaaaactgattatattttgctgtttgatggctatcggcaatgcgctattgtttgcatttaatcgtcattatctgacgcttatcacctgtggtgtgcttctggcatctctggccaatacggcaatgccacagttatttgctctggcgcgggaatatgcggataacagcgcgcgagaagtggtgatgtttagcagcgtgatgcgtgcgcagctttctctggcatgggttatcggtccaccgttggcctttatgctggcgttgaattacggctttacggtgatgtttagcattgccgccgggatattcacactcagtctggtattgattgcatttatgcttccgtctgtggcgcgggtagaactgccgagcgaaaatgctttaagtatgcaaggtggctggcaggatagtaacgtacggatgttatttgtcgccagcacgttaatgcggacctgcaacaccatgtacattattgatatgccgttgtggatcagtagcgagttaggattgccagacaaactggcgggtttcctgatggggacggcagctggactggaaataccagcaatgattctggctggctactatgtcaaacgttatggtaagcggcgaatgatggtcatagcagtggcggcaggagtactgttttacaccggattgattttctttaatagccgtatggcgttgatgacgctgcaactttttaacgctgtatttatcggcattgttgcgggtattgggatgctatggtttcaggatttaatgcctggaagagcgggggcagctaccaccttatttactaacagtatttctaccggggtaattctggctggcgttattcagggagcaattgcacaaagttgggggcactttgctgtctactgggtaattgcggttatttctgttgtcgcattatttttaaccgcaaaggttaaagacgtttgatgacgtggacgatagcggaaagcccggtcatttgaccgggcaaggggattaattcataaacgcaggttgttttgcttcataagcggcaatggcgtcgtcgtgctgcaaggtaagcccaatactgtccagaccgttcatcatgcagtggcggcggaaggcatcgatggtaaagcgataggttttctctcccgctttcacctcttgcgcttccagatccacgtcgaaatggatccccggattagctttcaccagcgcaaacagttcgtccacttctgcatcgcttaatttcaccggcagcagctggttgttaaagctattgccgtagaagatgtcagcaaaactcggcgcaatcaccactttaaaaccgtagtcggtcaatgcccagggcgcgtgctcacggctagagccacagccgaagttttctcgtgccagcaaaatggaagcgccctgatactgcgggaagttcagcacgaagtccgggtttggctgttggcctttttcatccagaaaacgccagtcgttaaacagatgcgcgccaaaacccgtacgggtcactttctgcaaaaactgtttcgggatgattgcatcggtatcgacattggcggcatccagcggaaccaccaggcctgtgtgtttgataaatttctctgccatggtgtgctccttatttaatgttgcgaatgtcggcgaaatgtccggtcacagcagcagcggcagccattgccgggctgaccagatgcgtgcgcccgccgcgcccctggcggccttcaaagttacggttgctggtggaggcacaacgttcgcccggattcagacggtcgttgttcatcgccagacacatactgcagccaggcaagcgccattcaaaaccggcttcaataaagattttatccagaccttccgcttccgcctgggcttttaccgggccagagccgggaaccaccagtgcctgcacgcctggcgcgacttttcgccctttggcgatctccgctgccgcgcgtaaatcttcaatgcggctgttggtacaggaaccgataaacactttgtcgatagccacttcggtcagcggaatacccggtttcagccccatataggccagcgctttttctgcgctcgcgcgttcaaccggatcggcaaagctagccggatcgggaatattgtcgttcacggaaatcacctggccgggattggtgccccaggtgacctgcggactaatttcttctgcttgcagagtgacaacggtatcgaaagttgcgccttcgtcggtttgcagggttttccagtaggcaacggcgtcgtcgaaatctttgcctttcggcgcatgcagacggcctttgacatagttaaaggtggtttcgtccggtgcaaccagaccggcttttgcgcccatttcgattgccatattgcacagggtcatacgaccttccatgcttaaatcacggattgcttcgccgcaaaactccaccacatgcccggtgccgcctgcgctaccggttttaccgataattgccagcacgatatcttttgcggtaatgcccggcgcggctttgccctggacttcaattttcatggtttttgcgcggccctgtttcagggtttgcgttgccagtacgtgttcaacttcggaagtgccgataccaaaggccagtgcgccaaacgcgccgtgggtggcggtatggctgtcgccgcagacaatggtcatccccggcaaggtgacgccctgttccggccccattacgtggacgatcccctgatacgggtgattcaggtcatacagttcgacgccaaattctttgcagtttttgatcagttcctgcatctggatacgcgccatttcaccgcaggcattaatgtctttggtctgggtagagacgttgtgatccatggtagcgaaggttttgcccggctgacgtaccgggcgaccgtgggcgcgcagaccatcgaacgcctgcggactggtcacttcatgcaccaggtggcggtcgatatataacagtggggtttcgttttcggcttcgtacacaacgtgagcgtcgaacaatttttcgtataacgtcttagccatgattacaccccttctgctacatagcgggcaatgatatcgcccatttcatcggtactaacggcggcagcgccacgggctaaatccccggtgcgaatgccttcttctaatgcgcggttaatggcgcgttcaatggcgcaagccgcatcatcggcatccaggctgtaacgcagcagcagtgccaggctaaggatttgtgcaatcgggttggcgatgtttttgcctgcgatatctggtgcgctgccgcccgccggttcatacagtccaaaaccttgctcgttcaggctggcggaaggcaacatccccatgctgccagtgatcattgcgcactcgtcagacagaatgtcgccaaacaggttggagcacagcagaacgtcaaactgacttggatctttaatcagctgcatggtggcgttgtcgatgtacatatgcgccagttcgacatccgggtattccgtggcgatctcgttaacgatctcccgccataaaatagaggattgcagcacgttggctttatcgatgctcgtcactttgtggcgacgcttgcgagcagattcaaacgcgatgcgggcgatacgttcgatctcaaaacggtgatacacctcggtatcaaaggctttttcatattgtccgctaccttcgcggccttttggctgaccgaaatagatgccgccggtcagttcgcgcacacacaggatgtcgaagccgtttgcggcaatgtctgcacgcagcggacagaatgcttccagcccctgatacagttttgccgggcgcaggttgctgaataatttgaagtgcttacgcagaggcagcagcgcgccgcgttctggttgctggtctggtggtaaatgttcccacttcgggccgcctacgctgccaaacagcacggcatcggcttgctcacaaccttcaaccgtcgcaggcggcagtggttgcccgtggttatcaatggctgcgccgcctacatcgtaatggctggtggtgatgcgcatcgcaaagcggttgcgcacggcatccagcactttcagcgcctgggtcatcacttccggaccaataccgtcccccggcaatacggcaatatggtaattcttgctcatcacacggtttccttgttgttttcgttgtgttgagctttgcgttgcaactctttttcgacttctgcggcacgccagatattgttcagaacgtgcaccatggctttggcagaactctcgacaatatcggtagccaggccgacgccgtggaagcggcgaccgttgtagttagcgacgatatccacctgacccagcgcatctttaccgtggcctttggcggtcaggctgtatttcaccagttcgacgttatattcagtgatgcggttaattgcctgatagacggcatcgaccggaccgttaccgttggcggcttctgctttgacttcttcgccacaggccagtttgacggcggcggtggcgatatcgttagagccagactgcacgctgaagtaatccagacggaaatgctccggctcttcttgctgcttaccgatgaaggccagcgcctccagatcgtaatcaaacacctgaccttttttgtccgccagcttcaggaaagcatcgtacaaattgtctaaattatattcactttctttataccccatctcatccatgcgatgtttcaccgccgcacgcccgctacgagaggtcagattcagctggatttggttcagaccaatagattctggtgtcatgatttcgtagttttcgcggtttttcagcacgccatcctggtgtataccggaggagtgtgcgaatgcgccgctgccaacaatggctttgtttgccgggatcggcatattacaaatctggctaactaactggctggtgcgccatatctcctggtgattaatggcggtgtggacgttgagaatatccttacgaactttgatcgccatgatgacttcttccagggaacagtttccggcacgctcgccgatcccgttcattgcgccttccacctggcgtgcaccggcatgtaccgccgccagactgtttccgaccgccaggcccaaatcgtcgtgggtatgtacggagataatggctttgtcgatgttaggcacgcgttcatacaggccgctgatgattccggcgaactcaaacggcatggtgtagcccacggtgtccggaatgttgatggtggtggcaccggcattaatcgccgcttcgaccactcgcgccagatcggcaatgggtgtacgcccggcatcttcgcaagaaaattcaacatcatcggtgtaattacgggcgcgtttcaccatatagatagcgcgttcgatcacctcgtccagcgtgctgcgcagcttggtggcgatgtgcattgggctagtggcaataaaggtatgaatacggaaggcttcggcgactttcagggattcggccgccacgtcgatatctttttccacgcagcgagctaacgcacatacgcggctgtttttaacctggcgggcgatggtttgcacgctttcaaaatcgcccgggctagagacggggaaaccgacttccatcacgtcaacacccatacgctcaagggccagcgcaatttgcagtttttctttcacactcaagcttgcctgtaacgcctgttcaccgtcgcgcaatgtggtatcgaaaataatgacttgctggctcatggtttgggtccttgtctcttttagagcgcctcgcttcgggcataaaaaaacccgcgcaatggcgcgggttttttgtttgactgcgtgctggcttaatgctggatgccgctcactcgtctaccgcgcaaagaagatgcgtttagtagtagtagaccgataaagcgaacgatgtgagtcattaaatcagctccagatgaatgcgatatgcttttagagttactggatacaaaaacggatgtcaaccctgacgcaataaaaacgtcccgccagcgtgagttctgcatccgtaaaattagctaattgtgctgcggtggttaaagtaagcgatattaatttctgcttaactaccgacgcttttcatcggttgacatatttcagcataaatttttgcatctaatcaacgaggaaaaaggggacaaaatgcacgcgttgcaaaacctatcctgatgatttgtattgaattatatgttttgcgattttttttgatattgatttggtgaatattattgatcaattaatgttaagaattaatgcattaaatatataaattaattattaaataagcacatttaatccattttgtagatgattgagtattcgcggtagttatgattagattgttttcgcaacaaaaacattatggattattatgctgtggtaaatgactcattccacggcaatggattctgtttttatcagaacccgtatctttatgttttccgaattttactcattttgctttttcttattttatatgcatgataaatcatattcttcaggattatttctctgcattccaataagggaaagggagttaagtgtgacagtggagttaagtatgccagaggtacaaacagatcatccagagacggcggagttaagcaaaccacagctacgcatggtcgatctcaacttattaaccgttttcgatgccgtgatgcaggagcaaaacattactcgtgccgctcatgttctgggaatgagccaacctgcggtcagtaacgctgttgcacgcctgaaggtgatgtttaatgacgagctttttgttcgttatggccgtggtattcaaccgactgctcgcgcatttcaactttttggtagtgttcgtcaggcattgcaactagtacaaaatgaattgcctggtagtggttttgaacccgcgagcagtgaacgtgtatttcatctttgtgtttgcagcccgttagacagcattctgaccagccagatttataatcacattgagcagattgcgccaaatatacatgttatgttcaagtctagtttaaatcagaacactgaacatcagctgcgttatcaggaaacggagtttgtgattagttatgaagacttccatcgtcctgaatttaccagcgtaccattatttaaagatgaaatggtgctggtagccagcaaaaatcatccaacaattaagggcccgttactgaaacatgatgtttataacgaacaacatgcggcggttagcctcgatcgtttcgcgagttttagtcaaccttggtatgacacggtagataagcaagccagtatcgcgtatcagggcatggcaatgatgagcgtacttagcgtggtgagccaaacgcatttggtcgctattgcgccgcgttggctggctgaagagttcgctgaatccttagaattacaggtattaccgctgccgttaaaacaaaacagcagaacctgttatctctcctggcatgaagctgccgggcgcgataaaggccatcagtggatggaagagcaattagtcagtatttgcaaacgctaactgattgcagaataggtcagacatgaatgtctggtttattctgcattttttattgaatgtagaattttattctgaatgtgtgggctctctattttaggattaattaaaaaaatagagaaattgctgtaagttgtgggattcagccgatttattatcaatttaatcctctgtaatggaggattttatcgtttcttttcacctttcctcctgtttattcttattaccccgtgtttatgtctctggctgccaattgcttaagcaagatcggacggttaatgtgttttacacattttttccgtcaaacagtgaggcaggccatggagatgttgtctggagccgagatggtcgtccgaagccttatcgatcagggcgttaaacaagtattcggttatcccggaggcgcagtccttgatatttatgatgcattgcataccgtgggtggtattgatcatgtattagttcgtcatgagcaggcggcggtgcatatggccgatggcctggcgcgcgcgaccggggaagtcggcgtcgtgctggtaacgagcggtccaggggcgaccaatgcgattactggcatcgccaccgcttatatggattccattccattagttgtcctttccgggcaggtagcgaccagcttgataggttacgatgcctttcaggagtgcgacatggtggggattagccgaccggtggttaaacacagttttctggttaagcaaacggaagacattccgcaggtgctgaaaaaggctttctggctggcggcaagtggtcgcccaggaccagtagtcgttgatttaccgaaagatattcttaatccggcgaacaaattaccctatgtctggccggagagcgtcagtatgcgttcttacaatcccactactaccggacataaagggcaaattaagcgtgctctgcaaacgctggtagcggcaaaaaaaccggttgtctacgtaggcggtggggcaatcacggcgggctgccatcagcagttgaaagaaacggtggaggcgttgaatctgcccgttgtttgcagtttgatggggctgggggcgtttccggcaacgcatcgtcaggcactgggcatgctgggaatgcacggtacctacgaagccaatatgacgatgcataacgcggatgtgattttcgccgtcggggtacgatttgatgaccgaacgacgaacaatctggcaaagtactgcccaaatgccactgttctgcatatcgatattgatcctacttccatttctaaaaccgtgactgcggatatcccgattgtgggggatgctcgccaggtcctcgaacaaatgcttgaactcttgagccaagaatccgcccatcaaccactggatgagatccgcgactggtggcagcaaattgaacagtggcgcgctcgtcagtgcctgaaatatgacactcacagtgaaaagattaaaccgcaggcggtgatcgagactctttggcggttgacgaagggagacgcttacgtgacgtccgatgtcgggcagcaccagatgtttgctgcactttattatccattcgacaaaccgcgtcgctggatcaattccggtggcctcggcacgatgggttttggtttacctgcggcactgggcgtcaaaatggcgttgccagaagaaaccgtggtttgcgtcactggcgacggcagtattcagatgaacatccaggaactgtctaccgcgttgcaatacgagttgcccgtactggtggtgaatctcaataaccgctatctggggatggtgaagcagtggcaggacatgatctattccggccgtcatagtcaatcttatatgcaaagcctacccgatttcgtccgtctggcggaagcctatgggcatgtcgggatccagatttctcatccgcatgagctggaaagcaaacttagcgaggcgctggaacaggtgcgcaataatcgcctggtgtttgttgatgttaccgtcgatggcagcgagcacgtctacccgatgcagattcgcgggggcggaatggatgaaatgtggttaagcaaaacggagagaacctgattatgcgccggatattaagtgtcttactcgaaaatgaaagtggcgcgttatcccgcgtgattggccttttttcccagcgtggctacaacattgaaagcctgaccgttgcgccaaccgacgatccgacattaagccgtatgaccatccagaccgtgggcgatgaaaaagtacttgagcagatcgaaaagcaattacacaaactggtcgatgtcttgcgcgtgagtgagttggggcagggcgcgcatgttgagcgggaaatcatgctggtgaaaattcaggccagcggttacgggcgtgacgaagtgaaacgtaatacggaaatattccgtgggcaaattatcgatgtcacacccagcctttataccgttcaattagcaggcaccagcggtaagcttgatgcatttttagcaagcattcgcgatgtggcgaaaattgtggaggttgctcgctctggtgtggtcggacttagccgcggcgataaaataatgcgttgagaatgatctcaatgcgcaatttacagcccaacatgtcacgttgggctttttttgcgaaatcagtgggaacctggaataaaagcagttgccgcagttaattttctgcgcttagatgttaatgaatttaacccataccagtacaatggctatggtttttacattttacgcaaggggcaattgtgaaactggatgaaatcgctcggctggcgggagtgagccggaccactgcaagctatgttattaacggcaaagcgaagcaataccgtgtgagcgacaaaaccgttgaaaaagtcatggctgtggtgcgtgagcacaattaccacccgaacgccgtggcagctgggcttcgtgctggacgcacacgttctattggtcttgtgatccccgatctggagaacaccagctatacccgcatcgctaactatcttgaacgccaggcgcggcaacggggttatcaactgctgattgcctgcagtgaagatcagccagacaacgaaatgcggtgcattgagcaccttttacagcgtcaggttgatgccattattgttagcacgagcttgcctcctgagcatcctttttatcaacgctgggctaacgacccgttcccgattgtcgcgctggaccgcgccctcgatcgtgaacacttcaccagcgtggttggtgccgatcaggatgatgccgaaatgctggcggaagagttacgtaagtttcccgccgagacggtgctttatcttggtgcgctaccggagctttctgtcagcttcctgcgtgaacaaggtttccgtactgcctggaaagatgatccgcgcgaagtgcatttcctgtatgccaacagctatgagcgggaggcggctgcccagttattcgaaaaatggctggaaacgcatccgatgccgcaggcgctgttcacaacgagctttgcgttgttgcaaggagtgatggatgtcacgctgcgtcgcgacggcaaactgccttctgacctggcaattgccacctttggcgataacgaactgctcgacttcttacagtgtccggtgctggcagtggctcaacgtcaccgcgatgtcgcagagcgtgtgctggagattgtcctggcaagcctggacgaaccgcgtaagccaaaacctggtttaacgcgcattaaacgtaatctctatcgccgcggcgtgctcagccgtagctaagccgcgaacaaaaatacgcgccaggtgaatttccctctggcgcgtagagtacgggactggacatcaatatgcttaaagtaaataagactattcctgactattattgataaatgcttttaaacccgcccgttaattaactcaccagctgaaattcacaataattaagtgatatcgacagcgcgtttttgcattattttgttacatgcggcgatgaattgccgatttaacaaacacttttctttgcttttgcgcaaacccgctggcatcaagcgccacacagacgtaacaaggactgttaaccggggaagatatgtcctaaaatgccgctcgcgtcgcaaactgacactttatatttgctgtggaaaatagtgagtcattttaaaacggtgatgacgatgagggattttttcttacagctattcataacgttaatttgcttcgcacgttggacgtaaaataaacaacgctgatattagccgtaaacatcgggttttttacctcggtatgccttgtgactggcttgacaagcttttcctcagctccgtaaactcctttcagtgggaaattgtggggcaaagtgggaataaggggtgaggctggcatgttccggggagcaacgttagtcaatctcgacagcaaagggcgcttaagtgtgcctacccgttatcgggaacagctgcttgagaacgctgccggtcaaatggtttgcaccattgacatttatcacccgtgcctgctgctttaccccctgcctgaatgggaaattatcgagcaaaaattaagccgtctgagcagcatgaacccggttgagcgccgtgtgcagcgcctactgttaggtcatgccagcgaatgtcagatggatggcgcaggtcgattgttaatcgcgccagtactgcggcaacatgccgggctgacaaaagaagtgatgctggttggacagttcaacaagtttgagctgtgggatgaaacaacctggcatcaacaggtcaaggaagatatcgacgcagagcagttggctaccggagacttaagcgagcgactgcaggacttgtctctataaaatgatggaaaactataaacatactacggtgctgctggatgaagccgttaatggcctcaatatccgtcctgatggcatctacattgatgggacttttggtcgcggtggtcacagtcgtctgatcctcagccagcttggcgaagaggggcgtttgctggcgatcgatcgcgacccgcaggctatcgccgttgcgaagactattgatgatccgcgcttctccatcatccacggacctttctccgcgctgggcgaatacgttgccgagcgcgatcttatcggcaagatcgacggcattctcctcgatcttggcgtctctagtccgcaacttgatgatgctgaacgtggcttttcctttatgcgcgatggtccgctggacatgcgtatggacccaacccgtgggcagagtgccgctgaatggctacaaaccgcagaagaagccgatatcgcctgggtattgaaaacctatggtgaagagcgttttgccaaacgcattgcccgcgccattgtcgagcgtaaccgcgaacagccgatgacccgcaccaaagaactggcggaagtcgtggctgctgcaacgccggtgaaagataagtttaaacatcccgcgacccgtaccttccaggcggtgcgcatttgggtaaacagtgaactggaggagatagagcaggcgctaaaaagcagcctcaacgtgctggccccgggtgggcggcttagcatcatcagcttccacagcctggaagaccgtattgtgaaacgttttatgcgtgaaaacagccgcggtccgcaagttccggcagggttaccgatgactgaagagcagctcaaaaaactgggtggccgtcagctgcgagcactaggcaagttaatgccgggcgaagaagaggtggctgagaaccctcgtgcccgtagtagtgttctgcgtattgcagagaggacgaatgcatgatcagcagagtgacagaagctctaagcaaagttaaaggaagcatgggaagccacgagcgccatgcattgcctggtgttatcggtgacgatcttttgcgatttgggaagctgccactctgcctgttcatttgcattattttgacggcggtgactgtggtaaccacggcgcaccatacccgtttactgaccgctcagcgcgaacaactggtgctggagcgagatgctttagacattgaatggcgcaacctgatccttgaagagaatgcgctcggcgaccatagccgggtggaaaggatcgccacggaaaagctgcaaatgcagcatgttgatccgagtcaagaaaatatcgtagtgcaaaaataaggataaacgcgacgcatgaaagcagcggcgaaaacgcagaaaccaaaacgtcaggaagaacatgccaactttatcagttggcgttttgcgttgttatgcggctgtattctcctggcgctggcttttctgctcggacgcgtagcgtggttacaagttatctccccggatatgctggtgaaagagggcgacatgcgttctcttcgcgttcagcaagtttccacctcccgcggcatgattactgaccgttctggtcgcccgttagcggtgagcgtgccggtaaaagcgatttgggctgacccgaaagaagtgcatgacgctggcggtatcagcgtcggtgaccgctggaaggcgctggctaacgcgctcaatattccgctggatcagcttagtgcccgcattaacgccaacccgaaagggcgctttatttatctggcgcgtcaggtgaaccctgacatggcggactacatcaaaaaactgaaactgccggggattcatctgcgtgaagagtctcgccgttactatccgtccggcgaagtgactgctcacctcatcggctttactaacgtcgatagtcaagggattgagggcgttgagaagagtttcgataaatggcttaccgggcagccgggtgagcgcattgtgcgtaaagaccgctatggtcgcgtaattgaagatatttcttctactgacagccaggcagcgcacaacctggcgctgagtattgatgaacgcctgcaggcgctggtttatcgcgaactgaacaacgcggtggcctttaacaaggctgaatctggtagcgccgtgctggtggatgtcaacaccggtgaagtgctggcgatggctaacagcccgagttacaaccctaacaatctgagcggcacgccgaaagaggcgatgcgtaaccgtaccatcaccgacgtgtttgaaccgggcagtacggttaaaccgatggtggtaatgaccgcgttgcaacgtggcgtggtgcgggaaaacagcgtactcaataccattccttatcgaattaacggccacgaaatcaaagacgtggcacgctacagcgaattaaccctgaccggggtattacagaagagcagtaacgtcggtgtttccaagctggcgttagcgatgccgtccagtgcgttagtagatacttacagtcgttttggactgggaaaagcgaccaatttggggttggtcggagaacgcagtggcttatatcctcaaaaacaacggtggtctgacatagagagggccaccttctctttcggctacgggctaatggtaacaccattacagttagcgcgagtctacgcaactatcggcagctacggcatttatcgcccactgagcattaccaaagttgaccccccggttcccggtgaacgtgtcttcccggaatccattgtccgcactgtggtgcatatgatggaaagcgtggcgctaccaggcggcggcggcgtgaaggcggcgattaaaggctatcgtatcgccattaaaaccggtaccgcgaaaaaggtcgggccggacggtcgctacatcaataaatatattgcttataccgcaggcgttgcgcctgcgagtcagccgcgcttcgcgctggttgttgttatcaacgatccgcaggcgggtaaatactacggcggcgccgtttccgcgccggtctttggtgccatcatgggcggcgtattgcgtaccatgaacatcgagccggatgcgctgacaacgggcgataaaaatgaatttgtgattaatcaaggcgaggggacaggtggcagaagctaaagcctgagcgcttcgcgctggttgttgttatcaacgatccgcaggcgggtaaatactacggcggcgccgtttccgcgccggtctttggtgccatcatgggcggcgtattgcgtaccatgaacatcgagccggatgcgctgacaacgggcgataaaaatgaatttgtgattaatcaaggcgaggggacaggtggcagatcgtaatttgcgcgaccttcttgctccgtgggtgccagacgcacctagccgagcactgcgagagatgacactcgacagccgtgtggctgcggcgggcgatctctttgtagctgtagtaggtcatcaggcggacgggcgtcgatatatcccgcaggcgatagcgcaaggtgtggctgccattattgcagaggcgaaagatgaggcgaccgatggtgaaatccgtgaaatgcacggcgtaccggtcatctatctcagccagctcaacgagcgtttatctgcactggcgggccgcttttaccatgaaccctctgacaatttacgtctcgtgggcgtaacgggcaccaacggcaaaaccacgactacccagctgttggcgcagtggagccaactgcttggcgaaatcagcgcggtaatgggcaccgttggtaacggcctgctggggaaagtgatcccgacagaaaatacaaccggtagcgcagtcgatgttcagcatgagctggcggggctggtggatcagggcgcgacgttttgcgcaatggaagtttcctcccacgggctggtacagcaccgtgtggcggcattgaaatttgcggcgagcgtctttaccaacttaagccgcgatcaccttgattatcatggtgatatggaacactacgaagccgcgaaatggctgctttattctgagcatcattgcggtcaggcgattattaacgccgacgatgaagtgggccgccgctggctggcaaaactgccggacgcggttgcggtaagtatggaagatcatattaatccgaactgtcacggacgctggttgaaagcgaccgaagtgaactatcacgacagcggtgcgacgattcgctttagcagtagttggggcgatggcgaaattgaaagccatctgatgggcgcttttaacgtcagcaacctgctgctcgcgctggcgacactgttggcactcggctatccactggctgatctgctgaaaaccgccgcgcgtctgcaaccggtttgcggacgtatggaagtgttcactgcgccaggcaaaccgacggtggtggtggattacgcgcatacgccggatgcactggaaaaagccttacaggcggcgcgtctgcactgtgcgggcaagctgtggtgtgtctttggctgtggtggcgatcgcgataaaggtaagcgtccactgatgggcgcaattgccgaagagtttgctgacgtggcggtggtgacggacgataacccgcgtaccgaagaaccgcgtgccatcatcaacgatattctggcgggaatgttagatgccggacatgccaaagtgatggaaggccgtgctgaagcggtgacttgcgccgttatgcaggctaaagagaatgatgtggtactggtcgcgggcaaaggccatgaagattaccagattgttggcaatcagcgtctggactactccgatcgcgtcacggtggcgcgtctgctgggggtgattgcatgattagcgtaacccttagccaacttaccgacattctcaacggtgaactgcaaggtgcagatatcacccttgatgctgtaaccactgatacccgaaaactgacgccgggctgcctgtttgttgccctgaaaggcgaacgttttgatgcccacgattttgccgaccaggcgaaagctggcggcgcaggcgcactactggttagccgtccgctggacatcgacctgccgcagttaatcgtcaaggatacgcgtctggcgtttggtgaactggctgcatgggttcgccagcaagttccggcgcgcgtggttgctctgacggggtcctccggcaaaacctccgttaaagagatgacggcggcgattttaagccagtgcggcaacacgctttatacggcaggcaatctcaacaacgacatcggtgtaccgatgacgctgttgcgcttaacgccggaatacgattacgcagttattgaacttggcgcgaaccatcagggcgaaatagcctggactgtgagtctgactcgcccggaagctgcgctggtcaacaacctggcagcggcgcatctggaaggttttggcagccttgcgggtgtcgcgaaagcgaaaggtgaaatctttagcggcctgccggaaaacggtatcgccattatgaacgccgacaacaacgactggctgaactggcagagcgtaattggcagtcgcaaagtgtggcgtttcagtcccaatgccgccaacagcgatttcaccgccaccaatatccatgtgaccagccacggtacggaatttaccctacaaaccccaaccggtagcgtcgatgttctgctgccgttgccggggcgtcacaatattgcgaatgcgctggcagccgctgcgctctccatgtccgtgggcgcaacgcttgatgctatcaaagcggggctggcaaatctgaaagctgttccaggccgtctgttccccatccaactggcagaaaaccagttgctgctcgacgactcctacaacgccaatgtcggtagtatgactgcagcagtccaggtactggctgaaatgccgggctaccgcgtgctggtggtgggcgatatggcggaactgggcgctgaaagcgaagcctgccatgtacaggtgggcgaggcggcaaaagctgctggtattgaccgcgtgttaagcgtgggtaaacaaagccatgctatcagcaccgccagcggcgttggcgaacattttgctgataaaactgcgttaattacgcgtcttaaattactgattgctgagcaacaggtaattacgattttagttaagggtagtcgtagtgccgccatggaagaggtagtacgcgctttacaggagaatgggacatgttaatataagctttacaggagaatgggacatgttagtttggctggccgaacatttggtcaaatattattccggctttaacgtcttttcctatctgacgtttcgcgccatcgtcagcctgctgaccgcgctgttcatcagtttgtggatgggcccgcgtatgattgctcatttgcaaaaactttcctttggtcaggtggtgcgtaacgacggtcctgaaagtcacttcagcaagcgcggtacgccgaccatgggcgggattatgatcctgacggcgattgtgatctccgtactgctgtgggcttacccgtccaatccgtacgtctggtgcgtgttggtggtgctggtaggttacggtgttattggctttgttgatgattatcgcaaagtggtgcgtaaagacaccaaagggttgatcgctcgttggaagtatttctggatgagcgtcattgcgctgggtgtcgccttcgccctgtaccttgccggcaaagacacgcccgcaacgcagctggtggtcccattctttaaagatgtgatgccgcagctggggctgttctacattctgctggcttacttcgtcattgtgggtactggcaacgcggtaaacctgaccgatggtctcgacggcctggcaattatgccgaccgtatttgtcgccggtggttttgcgctggtggcgtgggcgaccggcaatatgaactttgccagctacttgcatataccgtatctgcgacacgccggggaactggttattgtctgtaccgcgatagtcggggcaggactgggcttcctgtggtttaacacctatccggcgcaggtctttatgggcgatgtaggtagcctggcgttaggtggtgcgttaggcattatcgccgtactgctacgtcaggaattcctgctggtgattatggggggcgtgttcgtggtagaaacgctttctgtcatcctgcaggtcggctcctttaaactgcgcggacaacgtattttccgcatggcaccgattcatcaccactatgaactgaaaggctggccggaaccgcgcgtcattgtgcgtttctggattattagcctgatgctggttctgattggtctggcaacgctgaaggtacgttaatcatggctgattatcagggtaaaaatgtcgtcattatcggcctgggcctcaccgggctttcctgcgtggactttttcctcgctcgcggtgtgacgccgcgcgttatggatacgcgtatgacaccgcctggcctggataaattacccgaagccgtagaacgccacacgggcagtctgaatgatgaatggctgatggcggcagatctgattgtcgccagtcccggtattgcactggcgcatccatccttaagcgctgccgctgatgccggaatcgaaatcgttggcgatatcgagctgttctgtcgcgaagcacaagcaccgattgtggcgattaccggttctaacggcaaaagcacggtcaccacgctagtgggtgaaatggcgaaagcggcgggggttaacgttggtgtgggtggcaatattggcctgcctgcgttgatgctactggatgatgagtgtgaactgtacgtgctggaactgagcagcttccagctggaaaccacctccagcttacaggcggtagcagcgaccattctgaacgtgactgaagatcatatggatcgctatccgtttggtttacaacagtatcgtgcagcaaaactgcgcatttacgaaaacgcgaaagtttgcgtggttaatgctgatgatgccttaacaatgccgattcgcggtgcggatgaacgctgcgtcagctttggcgtcaacatgggtgactatcacctgaatcatcagcagggcgaaacctggctgcgggttaaaggcgagaaagtgctgaatgtgaaagagatgaaactttccgggcagcataactacaccaatgcgctggcggcgctggcgctggcagatgctgcagggttaccgcgtgccagcagcctgaaagcgttaaccacattcactggtctgccgcatcgctttgaagttgtgctggagcataacggcgtacgttggattaacgatagcaaagcgaccaacgtcggcagtacggaagcggcgctgaatggcctgcacgtagacggcacactgcatttgttgctgggtggcgatggtaaaagcgcggactttagcccactggcgcgttacctgaatggcgataacgtacgtctgtattgtttcggtcgtgacggcgcgcagctggcggcgctacgtccggaagtggcagaacaaaccgaaactatggaacaggcgatgcgcttgctggctccgcgtgttcagccgggcgatatggttctgctctccccagcctgtgccagccttgatcagttcaagaactttgaacaacgaggcaatgagtttgcccgtctggcgaaggagttaggttgatgcgtttatctctccctcgcctgaaaatgccgcgcctgccaggattcagtatcctggtctggatctccacggcgctaaagggctgggtgatgggcagccgggaaaaagataccgacagcctgatcatgtacgatcgcaccttactgtggctgaccttcggcctcgcggcgattggctttatcatggtgaccagcgcgagtatgcccatagggcaacgcttaaccaacgatccgttcttcttcgcgaagcgtgatggtgtctatctgattttggcgtttattctggcgatcattacgctgcgtctgccgatggagttctggcaacgctacagtgccacgatgctgctcggatctatcatcctgctgatgatcgtcctggtagtgggtagcagcgttaaaggggcaagccgttggatcgatctcggtttgctgcgtatccagcctgcggagctgacaaaactgagcctgttttgctatatcgccaactatctggtgcgtaaaggcgacgaagtacgtaataacctgcgcggcttcctgaaaccgatgggcgtgattctggtgttggcagtgttactgctggcacagccagaccttggtacggtggtggtgttgtttgtgactacgctggcgatgttgttcctggcgggagcgaaattgtggcagttcattgccattatcggtatgggcattagtgcggttgtgttgctgatactcgccgaaccgtaccgtatccgccgtgttaccgcattctggaacccgtgggaagatccctttggcagcggctatcagttaacgcaaagcctgatggcgtttggtcgcggcgaactttgggggcaaggtttaggtaacagcgtacaaaaactggagtatctgccggaagcgcacactgactttattttcgccattatcggcgaagaactggggtatgtcggtgtggtgctggcacttttaatggtattcttcgtcgcttttcgcgcgatgagcattggccgtaaagcattagaaattgaccaccgtttttccggttttctcgcctgttctattggcatctggtttagcttccaggcgctggttaacgtaggcgcggcggcggggatgttaccgaccaaaggtctgacattgccgctgatcagttacggtggtagcagcttactgattatgagcacagccatcatgatgctgttgcgtattgattatgaaacgcgtctggagaaagcgcaggcgtttgtacgaggtagtcgatgagtggtcaaggaaagcgattaatggtgatggcaggcggaaccggtggacatgtattcccgggactggcggttgcgcaccatctaatggctcagggttggcaagttcgctggctggggactgccgaccgtatggaagcggacttagtgccaaaacatggcatcgaaattgatttcattcgtatctctggtctgcgtggaaaaggtataaaagcactgatagctgccccgctgcgtatcttcaacgcctggcgtcaggcgcgggcgattatgaaagcgtacaaacctgacgtggtgctcggtatgggaggctacgtgagtggtccaggtggtctggccgcgtggagcttaggcattccggttgtacttcatgaacaaaacggtattgcgggcttaaccaataaatggctggcgaagattgccaccaaagtgatgcaggcgtttccaggtgctttccctaatgcggaagtagtgggtaacccggtgcgtaccgatgtgttggcgctgccgttgccgcagcaacgtttggctggacgtgaaggtccggttcgtgtgctggtagtgggtggttctcagggcgcacgcattcttaaccagacaatgccgcaggttgctgcgaaactgggtgatagtgtcactatctggcatcagagcggcaaaggtagccaacaatccgttgaacaggcgtatgccgaagcggggcaaccgcagcataaagtgacggaatttattgatgatatggcggcggcgtatgcgtgggcggatgtcgtcgtttgccgctccggtgcgttaacggtgagtgaaatcgccgcggcaggactaccggcgttgtttgtgccgtttcaacataaagaccgccagcaatactggaatgcgctaccgctggaaaaagcgggcgcagccaaaattatcgagcagccacagcttagcgtggatgctgtcgccaacaccctggccgggtggagccgagaaaccttattaaccatggcagaacgcgcccgcgctgcatccattccggatgccaccgagcgagtggcaaatgaagtgagccgggttgcccgggcgtaattgtagcgatgccttttgcatcgtatgaatttaagaagttaatggcgtaaagaatgaatacacaacaattggcaaaactgcgttccatcgtgcccgaaatgcgtcgcgttcggcacatacattttgtcggcattggtggtgccggtatgggcggtattgccgaagttctggccaatgaaggttatcagatcagtggttccgatttagcgccaaatccggtcacgcagcagttaatgaatctgggtgcgacgatttatttcaaccatcgcccggaaaacgtacgtgatgccagcgtggtcgttgtttccagcgcgatttctgccgataacccggaaattgtcgccgctcatgaagcgcgtattccggtgatccgtcgtgccgaaatgctggctgagttaatgcgttttcgtcatggcatcgccattgccggaacgcacggcaaaacgacaaccaccgcgatggtttccagcatctacgcagaagcggggctcgacccaaccttcgttaacggcgggctggtaaaagcggcgggggttcatgcgcgtttggggcatggtcggtacctgattgccgaagcagatgagagtgatgcaagcttcctgcatctgcaaccgatggtggcgattgtcaccaatatcgaagccgaccacatggatacctaccagggcgactttgagaatttaaaacagacttttattaattttctgcacaacctgccgttttacggtcgtgcggtgatgtgtgttgatgatccggtgatccgcgaattgttaccgcgagtggggcgtcagaccacgacttacggcttcagcgaagatgccgacgtgcgtgtagaagattatcagcagattggcccgcaggggcactttacgctgctgcgccaggacaaagagccgatgcgcgtcaccctgaatgcgccaggtcgtcataacgcgctgaacgccgcagctgcggttgcggttgctacggaagagggcattgacgacgaggctattttgcgggcgcttgaaagcttccaggggactggtcgccgttttgatttcctcggtgaattcccgctggagccagtgaatggtaaaagcggtacggcaatgctggtcgatgactacggccaccacccgacggaagtggacgccaccattaaagcggcgcgcgcaggctggccggataaaaacctggtaatgctgtttcagccgcaccgttttacccgtacgcgcgacctgtatgatgatttcgccaatgtgctgacgcaggttgataccctgttgatgctggaagtgtatccggctggcgaagcgccaattccgggagcggacagccgtagcctgtgtcgcacaattcgtggacgtgggaaaattgatcccattctggtgccggatccggcgcgggtagccgagatgctggcaccggtattaaccggtaacgacctgattctcgttcagggggctggtaatattggaaaaattgcccgttctttagctgaaatcaaactgaagccgcaaactccggaggaagaacaacatgactgataaaatcgcggtcctgttgggtgggacctccgctgagcgggaagtttctctgaattctggcgcagcggtgttagccggactgcgtgaaggcggtattgacgcgtatcctgtcgacccgaaagaagtcgacgtgacgcaactgaagagcatgggctttcagaaagtgtttatcgcgctacacggtcgcggcggtgaagatggtacgctgcaggggatgctcgagctgatgggcttgccttataccggaagcggagtgatggcatctgcgcttagtatggataaactacgcagcaaacttctatggcaaggtgccggtttaccggtcgcgccgtgggtagcgttaacccgcgcagagtttgaaaaaggcctgagcgataagcagttagcagaaatttctgctctgggtttgccggttatcgttaagccgagccgcgaaggttccagtgtgggaatgagtaaagtagtagcagaaaatgctctacaagatgcattaagattggcatttcagcacgatgaagaagtattgattgaaaaatggctaagtgggccggagttcacggttgcgatactcggtgaagaaattttaccgagtatacgtattcaaccgtccggaaccttctatgattatgaggcgaagtatctctctgatgagacacagtatttctgccccgcaggtctggaagcgagtcaagaggccaatttgcaggcattagtgctgaaagcatggacgacgttaggttgcaaaggatggggacgtattgacgttatgctggacagcgatggacagttttatctgctggaagccaataccagtccgggtatgaccagccacagcctggtgccgatggcggcacgtcaggcaggtatgagcttcagccagttggtagtacgaattctggaactggcggactaatatgagccaggctgctctgaacacgcgaaacagcgaagaagaggtttcttctcgccgcaataatggaacgcgtctggcggggatccttttcctgctgaccgttttaacgacagtgttggtgagcggctgggtcgtgttgggctggatggaagatgcgcaacgcctgccgctcagtaagctggtgttgaccggtgaacgccattacacacgtaatgacgatatccggcagagcatcctggcattgggtgagccgggtacctttatgacccaggatgtcaacatcatccagacgcaaatagaacaacgcctgccgtggattaagcaggtgagcgtcagaaagcagtggcctgatgaattgaagattcatctggttgaatatgtgccgattgcgcggtggaatgatcaacatatggtagacgcggaaggaaataccttcagcgtgccgccagaacgcaccagcaagcaggtgcttccaatgctgtatggcccggaaggcagcgccaatgaagtgttgcagggctatcgcgaaatggggcagatgctggcaaaggacagatttactctgaaggaagcggcgatgaccgcgcggcgttcctggcagttgacgctgaataacgatattaagctcaatcttggccggggcgatacgatgaaacgtttggctcgctttgtagaactttatccggttttacagcagcaggcgcaaaccgatggcaaacggattagctacgttgatttgcgttatgactctggagcggcagtaggctgggcgcccttgccgccagaggaatctactcagcaacaaaatcaggcacaggcagaacaacaatgatcaaggcgacggacagaaaactggtagtaggactggagattggtaccgcgaaggttgccgctttagtaggggaagttctgcccgacggtatggtcaatatcattggcgtgggcagctgcccgagccgtggtatggataaaggcggggtgaacgacctcgaatccgtggtcaagtgcgtacaacgcgccattgaccaggcagaattgatggcagattgtcagatctctagcgtatatctggcgctttctggtaagcacatcagctgccagaatgaaattggtatggtgcctatttctgaagaagaagtgacgcaagaagatgtggaaaacgtcgtccataccgcgaaaagcgtgcgtgtgcgcgatgagcatcgtgtgctgcatgtgatcccgcaagagtatgcgattgactatcaggaagggatcaagaatccggtaggacttagcggcgtgcggatgcaggcaaaagtgcacctgatcacatgtcacaacgatatggcgaaaaacatcgtcaaagcggttgaacgttgtgggctgaaagttgaccaactgatatttgccggactggcaagtagttatagcgtattgacggaagatgaacgtgaactgggtgtctgcgtcgtcgatatcggtggtggtacaatggatatcgccgtttataccggtggggcattgcgccacactaaggtaattccttatgctggcaatgtcgtgaccagtgatatcgcttacgcctttggcacgccgccaagcgacgccgaagcgattaaagttcgccacggttgtgcgctgggttccatcgttggaaaagatgagagcgtggaagtgccgagcgtaggtggtcgtccgccacggagtctgcaacgtcagacactggcagaggtgatcgagccgcgctataccgagctgctcaacctggtcaacgaagagatattgcagttgcaggaaaagcttcgccaacaaggggttaaacatcacctggcggcaggcattgtattaaccggtggcgcagcgcagatcgaaggtcttgcagcctgtgctcagcgcgtgtttcatacgcaagtgcgtatcggcgcgccgctgaacattaccggtttaacggattatgctcaggagccgtattatagcacggcggtgggattgcttcactatgggaaagagagtcatcttaacggtgaagctgaagtagaaaaacgtgttacagcaagtgttggcagctggatcaagcgactcaatagttggctgcgaaaagagttttaatttttatgaggccgacgatgattacggcctcaggcgacaggcacaaatcggagagaaactatgtttgaaccaatggaacttaccaatgacgcggtgattaaagtcatcggcgtcggcggcggcggcggtaatgctgttgaacacatggtgcgcgagcgcattgaaggtgttgaattcttcgcggtaaataccgatgcacaagcgctgcgtaaaacagcggttggacagacgattcaaatcggtagcggtatcaccaaaggactgggcgctggcgctaatccagaagttggccgcaatgcggctgatgaggatcgcgatgcattgcgtgcggcgctggaaggtgcagacatggtctttattgctgcgggtatgggtggtggtaccggtacaggtgcagcaccagtcgtcgctgaagtggcaaaagatttgggtatcctgaccgttgctgtcgtcactaagcctttcaactttgaaggcaagaagcgtatggcattcgcggagcaggggatcactgaactgtccaagcatgtggactctctgatcactatcccgaacgacaaactgctgaaagttctgggccgcggtatctccctgctggatgcgtttggcgcagcgaacgatgtactgaaaggcgctgtgcaaggtatcgctgaactgattactcgtccgggtttgatgaacgtggactttgcagacgtacgcaccgtaatgtctgagatgggctacgcaatgatgggttctggcgtggcgagcggtgaagaccgtgcggaagaagctgctgaaatggctatctcttctccgctgctggaagatatcgacctgtctggcgcgcgcggcgtgctggttaacatcacggcgggcttcgacctgcgtctggatgagttcgaaacggtaggtaacaccatccgtgcatttgcttccgacaacgcgactgtggttatcggtacttctcttgacccggatatgaatgacgagctgcgcgtaaccgttgttgcgacaggtatcggcatggacaaacgtcctgaaatcactctggtgaccaataagcaggttcagcagccagtgatggatcgctaccagcagcatgggatggctccgctgacccaggagcagaagccggttgctaaagtcgtgaatgacaatgcgccgcaaactgcgaaagagccggattatctggatatcccagcattcctgcgtaagcaagctgattaagaattgactggaatttgggtttcgaggctctttgtgctaaactggcccgccgaatgtatagtacacttcggttggataggtaatttggcgagataatacgatgatcaaacaaaggacacttaaacgtatcgttcaggcgacgggtgtcggtttacataccggcaagaaagtcaccctgacgttacgccctgcgccggccaacaccggggtcatctatcgtcgcaccgacttgaatccaccggtagatttcccggccgatgccaaatctgtgcgtgataccatgctctgtacgtgtctggtcaacgagcatgatgtacggattagtaccgtagagcacctcaatgctgctctcgcgggcttgggcatcgataacattgttatcgaagttaacgcgccggaaatcccgatcatggacggcagcgccgctccgtttgtatacctgctgcttgacgccggtatcgacgagttgaactgcgccaaaaaatttgttcgcatcaaagagactgttcgtgtcgaagatggcgataagtgggctgaatttaagccgtacaatggttttagcctggatttcaccatcgattttaaccatccggctattgattccagcaaccagcgctatgcgatgaacttctccgctgatgcgtttatgcgccagatcagccgtgcgcgtacgttcggtttcatgcgtgatatcgaatatctgcagtcccgtggtttgtgcctgggcggcagcttcgattgtgccatcgttgttgacgattatcgcgtactgaacgaagacggcctgcgttttgaagacgaatttgtgcgtcacaaaatgctcgatgcgatcggtgacttgttcatgtgtggtcacaatattattggtgcatttaccgcttataaatccggtcatgcactgaataacaaactgctgcaggctgtcctggcgaaacaggaagcctgggaatatgtgaccttccaggacgacgcagaactgccgttggccttcaaagcgcctagtgctgtactggcataacgacatttatactgtcgtataaaattcgactggcaaatctggcactctctccggccaggtgaaccagtcgtttttttttgaattttataagagctataaaaaacggtgcgaacgctgttttcttaagcacttttccgcacaacttatcttcattcgtgctgtggactgcaggctttaatgataagatttgtgcgctaaatacgtttgaatatgatcgggatggcaataacgtgagtggaatactgacgcgctggcgacagtttggtaaacgctacttctggccgcatctcttattagggatggttgcggcgagtttaggtttgcctgcgctcagcaacgccgccgaaccaaacgcgcccgcaaaagcgacaacccgcaaccacgagcctagtgccaaagttaactttggtcaattggccttgctggaagcgaacacacgccgcccgaatagcaactattccgttgattactggcatcaacatgccattcgcacggtaatccgtcatctttctttcgcaatggcaccgcaaacactgcccgttgctgaagaatctttgcctcttcaggcgcaacatcttgcattactggatacgctcagcgcgctgctgacccaggaaggcacgccgtctgaaaagggttatcgcattgattatgcgcattttaccccacaagcaaaattcagcacgcccgtctggataagccaggcgcaaggcatccgtgctggccctcaacgcctcacctaacaacaataaacctttacttcattttattaactccgcaacgcggggcgtttgagattttattatgctaatcaaattgttaactaaagttttcggtagtcgtaacgatcgcaccctgcgccggatgcgcaaagtggtcaacatcatcaatgccatggaaccggagatggaaaaactctccgacgaagaactgaaagggaaaaccgcagagtttcgtgcacgtctggaaaaaggcgaagtgctggaaaatctgatcccggaagctttcgccgtggtacgtgaggcaagtaagcgcgtctttggtatgcgtcacttcgacgttcagttactcggcggtatggttcttaacgaacgctgcatcgccgaaatgcgtaccggtgaaggaaaaaccctgaccgcaacgctgcctgcttacctgaacgcactaaccggtaaaggcgtgcacgtagttaccgtcaacgactacctggcgcaacgtgacgccgaaaacaaccgtccgctgtttgaattccttggcctgactgtcggtatcaacctgccgggcatgccagcaccggcaaagcgcgaagcttacgcagctgacatcacttacggtacgaacaacgaatacggctttgactacctgcgcgacaacatggcgttcagccctgaagaacgtgtacagcgtaaactgcactatgcgctggtggacgaagtggactccatcctgatcgatgaagcgcgtacaccgctgatcatttccggcccggcagaagacagcagcgaaatgtataaacgcgtgaataaaattattccgcacctgatccgtcaggaaaaagaagactccgaaaccttccagggcgaaggccacttcagcgtggacgaaaaatctcgccaggtgaacctgaccgaacgtggtctggtgctgattgaagaactgctggtgaaagagggcatcatggatgaaggggagtctctgtactctccggccaacatcatgctgatgcaccacgtaacggcggcgctgcgcgctcatgcgctgtttacccgtgacgtcgactacatcgttaaagatggtgaagttatcatcgttgacgaacacaccggtcgtaccatgcagggccgtcgctggtccgatggtctgcaccaggctgtggaagcgaaagaaggtgtgcagatccagaacgaaaaccaaacgctggctagcatcaccttccagaactacttccgtctgtatgaaaaactggcggggatgaccggtactgctgataccgaagctttcgaatttagcagtatctacaagctggataccgtcgttgttccgaccaaccgtccaatgattcgtaaagatctgccggacctggtctacatgactgaagcggaaaaaattcaggcgatcattgaagatatcaaagaacgtactgcgaaaggccagccggtgctggtgggtactatctccatcgaaaaaagcgagctggtgagtaacgaactgaccaaagccggtattaagcacaacgtcctgaacgccaaattccacgccaacgaagcggcgattgttgctcaggcaggttatccggctgcggtgactatcgcgaccaatatggcgggtcgtggtacagatattgtgctcggtggtagctggcaggcagaagttgccgcgctggaaaatccgaccgcagagcaaattgaaaaaattaaagccgactggcaggtacgtcacgatgcggtactggaagcaggtggcctgcatatcatcggtaccgagcgtcacgaatcccgtcgtatcgataaccagttgcgcggtcgttctggtcgtcagggggatgctggttcttcccgtttctacctgagcatggaagatgcgctgatgcgtatttttgcttccgaccgagtatccggcatgatgcgtaaactgggtatgaagccaggcgaagccattgaacacccgtgggtgactaaagcgattgccaacgcccagcgtaaagttgaaagccgtaacttcgacattcgtaagcaactgctggaatatgatgacgtggctaacgatcagcgtcgcgccatttactcccagcgtaacgaactgttggatgtcagcgatgtgagcgaaaccattaacagcattcgtgaagatgtgttcaaagcgaccattgatgcctacattccaccacagagcctggaagaaatgtgggatattccggggctgcaggaacgtctgaagaacgatttcgacctcgatttgccaattgccgagtggctggataaagaaccagaactgcatgaagagacgctgcgtgagcgcattctggcgcagtccatcgaagtgtatcagcgtaaagaagaagtggttggtgctgagatgatgcgtcacttcgagaaaggcgtcatgctgcaaacgcttgactccctgtggaaagagcacctggcagcgatggactatctgcgtcagggtatccacctgcgtggctacgcacagaaagatccgaagcaggaatacaaacgtgaaagcttctccatgtttgcagcgatgctggagagcttgaaatatgaagttatcagtacgctgagcaaagttcaggtacgtatgcctgaagaggttgaggagctggaacaacagcgtcgtatggaagccgagcgtttagcgcaaatgcagcagcttagccatcaggatgacgactctgcagccgcagctgcactggcggcgcaaaccggagagcgcaaagtaggacgtaacgatccttgcccgtgcggttctggtaaaaaatacaagcagtgccatggccgcctgcaataaaagctaactgttgaagtaaaaggcgcaggattctgcgccttttttataggtttaagacaatgaaaaagctgcaaattgcggtaggtattattcgcaacgagaacaatgaaatctttataacgcgtcgcgcagcagatgcgcacatggcgaataaactggagtttcccggcggtaaaattgaaatgggtgaaacgccggaacaggcggtggtgcgtgaacttcaggaagaagtcgggattaccccccaacattttagcctatttgaaaaactggaatatgaattcccggacaggcatataacactgtggttttggctggtcgaacgctgggaaggggagccgtggggtaaagaagggcaacccggtgagtggatgagcctggtcggtcttaatgccgatgattttccgccagccaatgaaccggtaattgcgaagcttaaacgtctgtaagtcagataaggcgttttcgccgcatccgacattcgcacacgatgcctgatgcgacgctggcgcgtcttatcaggcctaaagggatttctaactcattgataaatttgtttttgtaggtcggataaggcgttcacgccgcatccgacatttgcacaagatgcctgatgcgacgctgtccgcgtcttatcaggcctacgtgcggcatcagacaaatgtcactgctttggttcttcgctccagtcatcgctttcggaaagatcgccactgctggggattcgtttttcttcagcagcccattctccgaggtcgatcagctgacaacgtttggagcaaaatggccgaaacgggctgatttcaccccacaccaccgttttcccgcaggttgggcaattcaccgtaatagtttcactcatttttactccttagcaacaggccagttcgaaatccagacgttccggtacctgtccgttttcagtgtccagcggcataaaacgaatggcaaaacggctcttatgtccggaaatttgcggataaagctgactatcgaggctcagattcaggcgcagcaagtcggcatcgccaccgttatcctgataaaaaccattcaggctggtttgtttacggaagggggcgctctggcgaattaaatccagcaccatggtaagtgcctgggtgagcgggttcaggctggcaatccaggtttctacctggctgtcgcgctgcgcctggggtagatgcagccaaatgtgcaatgtaggtaaatcaaagctgcaacagccgcctgggatgctcagtcgctgacgcaccagagcaatcaaacgatcttcacgcagaaattgcccgatacgcggcgcggaaattaatacgctccccgccgcttttaactgctgaattaatgcttcaatacggctctggtccacgccaggcacgccaatccaggtctggagtttacgttgctgccggtcaagttctttcaacagctcagtgcggacttcgccgcgctcgaaaacatccagtaattcactgacattacggaagaaatgcagcgcgccagcgtggtcaacgatgggtaaattaacggtgagttgctgaatcaaaaactcaatgcgcagccatgtacgcattttttcatttagtggatgttcaaaaaggacctgggtctgcattacggtttttcctgactgacaaactggctcgcaagctgcaaatagtgtgcgtgcaggcgggcaacatcgcttgcgatagcatccggtgcgccgttattatcaatgacgtcatctgccacggcaaggcgggcttcgcgcgttgcctgagcagcaaggatttgttcgacatgctcgcgagttacatcatcgcgctgcatggtgcgcttaagttgcgtttctgggctgacatccaccacaagcactcgattcgcttttttatacagactgttttctaccagcaatggcacaacccacagtacatagggggaagtagcttgctggatctggtgttgcgtctcttgctgaatcagcggatgcagcagggcgttaagccagtttttctcttccgggttggcgaagatccgctcgcgcaaggcccggcgctgcaatgttccatcagcagcaatcatgttagcgccaaagtgatcagcaatggcatgtagcgcaggtgcacctggttcaaccacctgacgcgcaataatatcggcatcaatgacgttaattccgagatcagcaaacgcattggcaacggtactcttgccactgccaatgcctcccgttaaggcaactatatacctcataatttatattcccgggaattcatcatgattatcaaaacgttaaaaatgagtgcacgaaagcgaaattgatgaaacgttcgctcactatttaccaggtaaatttatgggattgtagcgtaaaaaaagacaatttcgcagtcttgcgccgcattgattagtgcgtatgatagcgtcactggagttgcgctcttacccttatagccattaaccccaggaatccgcacatgcgtattgaagaagatctgaagttaggttttaaagacgttctcatccgccctaaacgctccactcttaaaagccgttccgatgttgaactggaacgtcaattcaccttcaaacatagtggtcagagctggtccggcgtgccgattatcgccgcaaatatggacaccgtaggcacattttctatggcctctgcgctggcttcttttgatattttgactgctgtgcataaacactattctgtcgaagagtggcaagcgtttatcaacaattcttccgctgatgtgctgaaacatgtgatggtttctaccggtacgtctgatgcggatttcgaaaaaactaaacagattctcgacctgaacccggcattaaacttcgtttgtattgacgtggcgaatggttattccgaacacttcgtgcagttcgttgcgaaagcgcgtgaagcgtggccgaccaaaaccatttgtgctggtaacgtagtgactggtgaaatgtgtgaggagcttatcctcagtggtgccgatatcgttaaagttggcattggcccaggttctgtttgtacaactcgcgtcaaaacaggcgtcggttatccgcaactttctgcggtaatcgaatgtgccgatgctgcgcacggtctgggcggaatgatcgtcagcgatggtggctgcaccacgccgggcgatgtggcgaaagcctttggcggcggtgccgatttcgtcatgcttggcggcatgctggcgggccacgaagagagcggcggtcgcatcgttgaggagaacggcgagaaatttatgctgttctacggcatgagctccgagtctgcgatgaaacgtcacgttggcggcgttgcggaatatcgcgcagcagaaggtaaaaccgttaagctgccgctgcgaggcccggttgaaaataccgcgcgagatattttgggcggcctgcgtagtgcttgtacatacgttggggctagtcgcctgaaagagctgaccaagcgcaccacgtttattcgtgtgcaggaacaagaaaaccgcatcttcaacaacctgtaatctcccaacgctggcgtggagcaacacgccagcgttatcccatcccactcatcgcatcgcctaaatggaaaattggcagatacattgccaccaccagcgtaccaataattcctcccgttatgatcagcaacgccggttccagtaaggctgcgaggttatccgccagcgccattgtgttttcccgatgatgatgggcgaggttgtctaacatgagatccagagagccggatgcctctcctgttctcactaattgcaaacagagcgggctaaactcaccggtattttttagcgccagccagatgggttgaccgttactgatatcgtgctggatttgtgtcagaagttgcacccagtacgggcagcgcattgtttctctgacgctctctacgccctgtaaaaaagtaatgcctgcactttgtgtcagcgccagaatcgtaaagatctgcgtgagtttttgtccccgcatcagactacccataatcgggatgcgtaacagcaatttctgccgcactataagccaggtcggtcggcgcatcagcaacttattggctatcgccagcagaaagccgaacaacaccagcagccagctccattcgccactaaagtctgccagcgtcatgatcccctgcgttagtgccggtagtggggtgttgaaggtcttatagatagcggcaaactccggcagaacaaaatgcagcattgccacaaccaccatgattgccatcgctaaaatgatgatgggataacgtaacgcacttttcactttgtcggtcaactgacgctgggctttttgctgacgcgccagttcaaagcagcattcatccagcttaccggtcagttcacccgtgcggatcatcgcctgatagagcggcggaaatacctcactccagggtaataaggcattggaaaaagcaatgccctgttcgagatcgtgcgccaggctttgcagcaacgcttgccattgcttactgggatgctgttccgccagcagagccagcccttcagaaagcgttaaccctgctttgagtagcgtcgccagttgatgaatgacttccgcgcttttatctcctcgccactgcgcagaattgatggcgattcgcttcaggcttagtggggtaaccatctgttgctgtagtgccataagcagtaaagtacggctctctgcccatagcatcccatcttgcgcattgccgtcgccggttatgccatgccagcgccagagttgcttactcgccatgcggcatcctcagtacgcggattaactcttcaaaggtggttaagccttgctctacggccaggcagccgttttcaaaaagcgtacgcatacccgcctgtcgtgcgtgcgtttccaggctttcaacgtcggtattagcggaaataagctgacgaatgaccggcgttatgggcagaacttcaaataaggccgtacgaccataaaaaccgtggtagcaatgtacacaaccgggtgcctgccagtggggcagcgggcttggccatacattgtctggaatgtggatgggctccccttgctgccggcgacaatgtgggcaaagtttgcgtaccagacgctgggctattaccagcgtaagcgcgctacttagcatccagcgggcgacccccatttgctgtaaacgtaccagcgtttcgcaggtggaattagtgtgtagggtagacaacaccaggtgaccagtttgcgccgctttaatagcgatctctgctgtttcgccatcgcggatctctccgatcatgatgacgtcaggatcctggcgcaataacgcacgcaaaacgccctgaaaggtgagtccggcacgcggatggatttgcgtctggtttagtccggctatggggatctcaactggatcttcgacgctacaaatattaatgtcagcggtattcagcttttgcagggcactataaagcgtgaccgttttgccgctgccggtagggccagttaccagcaccagtccctgtggttgttgcaaggcatgagcaaagtccgccagttgtaacggctgcattccaagcgtgttgacatccagtgcctgacccacctgctgtaacaaccttaataccaccttttcaccaccccgacatggtaaggtcgcaatacgaaaactgacggcgtttcctgccagttcgacagtgaattgcccgtcctgcggcaggcgatgttccgcaatatccaggtttcccagcacttttaatctggcggttaatgcgactccggcatccggactaacatccggtaaaggatgcaatacgccgtcgatacgcaagcggatgcggtaggcattgtccgctggttcgatatgaatatcagacgcgcgttgttccagcgcagattgtaacgttcgagttagcaactctgctttgggctgatgcttctcctgaacagctacgggcagtgtctgttgtgtgcgactggcgtgaccttccatttgttggcgcgtccagcaggtgatctcaatacgtttggtggtagcgaaatgcaatgcgtccagtagctcatggctaggtgcatcgactaccgcaacatgaaccacctcttcgctggcatccagcaagactccatgataacgcagacacagggcagtgagctgtggaatattcattgccgctccttagttggcgtcatcaaagcggaagacatcttcgcaggcttgctgcaatgcgctgtcactttgaatattgcagttgcgcgtccagccggtgacgccgtttgcgttatcccaacccggtgtcatgacgacgcttagcccattgagactttcttgcccggtcaggctcaccacgccctttgccacactcatggcactaacatagcgggtggtggtagggctgggaatgccattgctgccaccgtcgcaggtatctaatccaccatgttccagcgcgcacaactctacggcggtacggtaaggcacaaaggtttgtagcatgtcggtgagtgcggctttgcgcaggtagttttgataagcgggaataccaatggcgcttaaaatggcaatgatgccaataaccaccatcagttcgataagtgtaaaaccgcgttgcttgtccatctgtttcgctccttgatttggttggcgctactttggcaaacgccatcagcacaggcgaggggcaaaaaacgaaacgggaaagcagattccgaggttttttatttcgttgcagcgaaagacaagaaatttgcgaggcgttacgaagaaagttggggaaggggagattatccgcccgcgatggagcggataaatctgtcaactattagcgaaaacgcatactaaggtcgagtgcttgtacgtgtttagttagcgcaccgacggagataaagtccacgcccgtttcggcaaattcacgcagtgttttgtcagtgacgttgccagacacttccagtagcgccttgccgttggtgcgtttgacggcttcgcgcatctgttctgtttcgaagttatccagcatgatgatatcggctcctgctttcagggcttcatcaagttcttccagattctctacttcgacttctactggcgcatccgggtgcagccaggacgctttttcgaccgcctggcgcacactgccggaggcaataatatggttttctttgatcaggaaggcatcagaaagccccagacggtgattcgctccgccgccgcaaagtaccgcgtatttcagagcactacgcaggccgggtaaggttttgcgcgtatccaacaactgcgtgttggtgccttccagcaattcgacatagtggcgtaccttactggcaactccactaagggtttgcacaaaattaagcgcagtgcgttcgcccgttaacagcacgcgggatgggccttcaagttcgaacaaggattgattggcattgatgacatcgccgtcatccacatgccagattatggtgacatcgtcgcctgccagttgaataaacacctcttcaacccagcgtttgccgcaaaagacgccattctcgcgggtgatcaccgtggcatgagagcgagaattttccggtaaaagttttgccgtaatatcattgttggcatcgactgttccgcctaaatcttcccgcagcgcctgggccaccgcgccggggatatcgagattaatgcgttccagcagctcgtcacgtcgggtgtcagggttatagcggcgaggcggcatgttaaaactccagatagctaacgaatcataaggtagaaacatgctactctgaaccgggtattagcaccacatataaggagatcctgcatgttgttagaacaggggtggctggttggcgcgcgccgcgttcccagtccacattacgattgccgcccggatgacgaaacacccaccctgctggtggtgcacaatattagcctgccgccaggcgagtttggcggtccgtggatcgacgcattattcactggaactattgatccgcaggcacatcctttctttgctgagatcgcccatttgcgcgtctccgctcactgtttgattcgccgtgatggtgaaatagtccagtatgttcctttcgataaacgtgcatggcatgcgggagcctctcagtatcaggggcgcgaacgctgcaatgatttttctattgggattgagcttgaaggcaccgatacgctggcgtataccgatgcgcagtatcaacagcttgcggcggttacgcgggcactgattgattgctatccggatatcgctaaaaacatgacgggccattgtgatattgcgccggatcggaaaaccgatcccggtcctgcatttgattgggcacggtttcgtgtgctggtcagcaaggagacaacatgacgctatttacaaccttactggtgttaattttcgagcgcctgtttaagttgggcgagcactggcagcttgatcatcgtcttgaagcgttctttcggcgggtgaaacatttttctctcgggcgcacgttaggcatgaccattattgcgatgggcgtgacttttttactgttacgcgcattgcagggagtattgttcaacgttcccacgctactggtgtggctgctgattggtttgctgtgtattggcgcaggtaaagttcgtcttcattatcatgcttatctgacagctgctagtcgtaatgatagccatgcccgtgccacgatggctggcgaactcaccatgattcacggcgtcccggcaggctgcgacgaacgtgagtatttgcgtgagctgcaaaatgcattgctgtggattaactttcgtttttatcttgcaccgctgttctggctgattgtggggggaacctggggacccgttacgctgatggggtatgcgtttttgcgtgcatggcaatactggctggcgcgatatcagacgccgcatcatcgtttacagtccggcattgatgccgtgcttcatgtactggattgggtgccggttcgtcttgcgggtgtggtatatgccttgatcggtcatggtgagaaagcgttaccggcctggtttgctagcctgggtgatttccatactagccagtatcaggtgttaacgcgtctggcgcagttctctctggcgcgtgaaccgcatgtcgataaggtggagacgccgaaggcagcggttagtatggcgaagaaaaccagcttcgtggtcgtggtggtgattgcactactgacgatttacggggcgttggtgtaaagattattgccctcaccctgtacgggtgagggcgtagagagattaatgcgcttttacggctttggcggttttctctttaaacagatagccgatacctaacacgatcagccataccgggatcaggtatacgctaatcgccattcctggggtcatcagcataatcaccagtaccgccgccataaacagcaggcagatccagttacccagcggataaagcagagcagggaagcgagttaccacgccttgttcctgcttggcgcgacggaatttcatatgcgccaggctaatcatcgcccagttgattaccagtgcagataccaccagcgccattaacagtccgaaagcggactctggggcaaggtagttaatcagtacgcacaacgccgttaccagtgcagacaccagaatggtatttactggtacaccacgtttatcgacagacgccagcgcttttggcgcattaccctgttgtgccagaccaaacagcatacggctgttgcaatatacgcagctgttgtacacggagagcgccgcagtcagtaccacgatgttcagcgcattcgccacaaaggtatcgcctaactcgtggaagatcagcacaaacggactggtatcggcggtaacgcgggtccacggcatcagactgagcagaacggctaagctaccaatatagaaaatcaggatgcggtagataacctggttagttgctttcggtatactttgctccgggttatcagcttctgctgcggtgatccccaccagttccagaccaccgaagctgaacatgataatcgccatcatcatcaccagcccggtgaagccgtgcggcaggaaaccaccctgatcccacaggttgctaacggtcgcctgcgggccgccgttgccactgaatagcagccagccgccgaagatgatcatcgctaccaccgcgataactttgataatggcaaaccagaactccatctcgccaaacactttaacgttggtcaggttgatggcgttaatcaccacaaagaatacggcggcagaaacccaggtggggatttccggataccagaactgaatgtatttacccacggcagtcagctcagccatggcaactaaaacgtacagtacccagtagttccagccagaggcgaaaccggcaaaactgccccagtatttataagcaaagtggctaaaggagcctgcgacaggttcttcgaccaccatttcacccagctgacgcatgatcagaaaggcgataaaaccagcaatggcgtaacccaggataatccctggccctgcggactgtattacggaggcgctacccaggaataacccggtccctatcgcgccacccagcgcgataagctgaatatggcggtttttaaggccgcgctttagctgctcgccgtgctgttgaccttccatcatgaaacctcgtgcggtggttgtttttttgatctacgcagtgatgcgtgtgtaagtttgcaattccgtttgttgtattaatttgtttacatcaaagaagtttgaattgttacaaaaagacttccgtcagatcaagaataatggtatgcggcagcgaatgcacccgctttatgcatggttgaagatgagttgcttaaaaagaaaccgtttgtaaagctcagcctcaacccctctcaatatgtagaatgaatttaaattcgttttaattgaattaaaaatcacaaaattggtaagtgaatcggttcaattcggatttttatagtttaataatcgttaaaaaactcctttcctacgtaaagtctacatttgtgcatagttacaactttgaaacgttatatatgtcaagttgttaaaatgtgcacagtttcatgatttcaatcaaaacctgtatggacataaggtgaatactttgttactttagcgtcacagacatgaaattggtaagaccaattgacttcggcaagtggcttaagacaggaactcatggcctacagcaaaatccgccaaccaaaactctccgatgtgattgagcagcaactggagtttttgatcctcgaaggcactctccgcccgggcgaaaaactcccaccggaacgcgaactggcaaaacagtttgacgtctcccgtccctccttgcgtgaggcgattcaacgtctcgaagcgaagggcttgttgcttcgtcgccagggtggcggcacttttgtccagagcagcctatggcaaagcttcagcgatccgctggtggagctgctctccgaccatcctgagagtcagtatgacttgctcgaaacacgacacgccctggaaggtatcgccgcttattacgccgcgctgcgtagtaccgatgaagacaaggaacgcatccgtgaactccaccacgccatagagctggcgcagcagtctggcgatctggacgcggaaagtaacgccgtactccagtatcagattgccgtcaccgaagcggcccacaatgtggttctgcttcatctgctaaggtgtatggagccgatgttggcccagaatgtccgccagaacttcgaattgctctatagccgtcgcgagatgctgccgctggtgagtagtcaccgcacccgcatatttgaagcgattatggccggtaagccggaagaagcgcgcgaagcaagccatcgccatctggcctttatcgaagaaattttgctcgacagaagtcgtgaagagagccgccgtgagcgttctctgcgtcgtctggagcaacgaaagaattaatgatttttctggtaaaaattatccagaagatgttgtaaatcaagcgcatataaaagcgcggcaactaaacgtagaacctgtcttattgagctttccggcgagagttcaatgggacaggttccagaaaactcaacgttattagatagataaggaataacccatgagtgaacgtttcccaaatgacgtggatccgatcgaaactcgcgactggctccaggcgatcgaaagcgtcatccgtgaagaaggtgttgagcgtgctcagtatctgatcgaccaactgcttgctgaagcccgcaaaggcggtgtaaacgtagccgcaggcacaggtatcagcaactacatcaacaccatccccgttgaagaacaaccggagtatccgggtaatctggaactggaacgccgtattcgtagtgctatccgctggaacgccatcatgacggtgctgcgtgcgagcaaaaaagacctcgaactgggcggccatatggcgtccttccagtcttccgcaaccatttatgatgtgtgctttaaccacttcttccgtgcacgcaacgagcaggatggcggcgacctggtttacttccagggccacatctccccgggcgtgtacgctcgtgctttcctggaaggtcgtctgactcaggagcagctggataacttccgtcaggaagttcacggcaatggcctctcttcctatccgcacccgaaactgatgccggaattctggcagttcccgaccgtatctatgggtctgggtccgattggtgctatttaccaggctaaattcctgaaatatctggaacaccgtggcctgaaagatacctctaaacaaaccgtttacgcgttcctcggtgacggtgaaatggacgaaccggaatccaaaggtgcgatcaccatcgctacccgtgaaaaactggataacctggtcttcgttatcaactgtaacctgcagcgtcttgacggcccggtcaccggtaacggcaagatcatcaacgaactggaaggcatcttcgaaggtgctggctggaacgtgatcaaagtgatgtggggtagccgttgggatgaactgctgcgtaaggataccagcggtaaactgatccagctgatgaacgaaaccgttgacggcgactaccagaccttcaaaagcaaagatggtgcgtacgttcgtgaacacttcttcggtaaatatcctgaaaccgcagcactggttgcagactggactgacgagcagatctgggcactgaaccgtggtggtcacgatccgaagaaaatctacgctgcattcaagaaagcgcaggaaaccaaaggcaaagcgacagtaatccttgctcataccattaaaggttacggcatgggcgacgcggctgaaggtaaaaacatcgcgcaccaggttaagaaaatgaacatggacggtgtgcgtcatatccgcgaccgtttcaatgtgccggtgtctgatgcagatatcgaaaaactgccgtacatcaccttcccggaaggttctgaagagcatacctatctgcacgctcagcgtcagaaactgcacggttatctgccaagccgtcagccgaacttcaccgagaagcttgagctgccgagcctgcaagacttcggcgcgctgttggaagagcagagcaaagagatctctaccactatcgctttcgttcgtgctctgaacgtgatgctgaagaacaagagcatcaaagatcgtctggtaccgatcatcgccgacgaagcgcgtactttcggtatggaaggtctgttccgtcagattggtatttacagcccgaacggtcagcagtacaccccgcaggaccgcgagcaggttgcttactataaagaagacgagaaaggtcagattctgcaggaagggatcaacgagctgggcgcaggttgttcctggctggcagcggcgacctcttacagcaccaacaatctgccgatgatcccgttctacatctattacagcatgttcggcttccagcgtattggcgatctgtgctgggcggctggcgaccagcaagcgcgtggcttcctgatcggcggtacttccggtcgtaccaccctgaacggcgaaggtctgcagcacgaagatggtcacagccacattcagagcctgactatcccgaactgtatctcttacgacccggcttacgcttacgaagttgctgtcatcatgcatgacggtctggagcgtatgtacggtgaaaaacaagagaacgtttactactacatcactacgctgaacgaaaactaccacatgccggcaatgccggaaggtgctgaggaaggtatccgtaaaggtatctacaaactcgaaactattgaaggtagcaaaggtaaagttcagctgctcggctccggttctatcctgcgtcacgtccgtgaagcagctgagatcctggcgaaagattacggcgtaggttctgacgtttatagcgtgacctccttcaccgagctggcgcgtgatggtcaggattgtgaacgctggaacatgctgcacccgctggaaactccgcgcgttccgtatatcgctcaggtgatgaacgacgctccggcagtggcatctaccgactatatgaaactgttcgctgagcaggtccgtacttacgtaccggctgacgactaccgcgtactgggtactgatggcttcggtcgttccgacagccgtgagaacctgcgtcaccacttcgaagttgatgcttcttatgtcgtggttgcggcgctgggcgaactggctaaacgtggcgaaatcgataagaaagtggttgctgacgcaatcgccaaattcaacatcgatgcagataaagttaacccgcgtctggcgtaagaggtaaaagaataatggctatcgaaatcaaagtaccggacatcggggctgatgaagttgaaatcaccgagatcctggtcaaagtgggcgacaaagttgaagccgaacagagcctgatcaccgtagaaggcgacaaagcctctatggaagttccgtctccgcaggcgggtatcgttaaagagatcaaagtctctgttggcgataaaacccagaccggcgcactgattatgattttcgattccgccgacggtgcagcagacgctgcacctgctcaggcagaagagaagaaagaagcagctccggcagcagcaccagcggctgcggcggcaaaagacgttaacgttccggatatcggcagcgacgaagttgaagtgaccgaaatcctggtgaaagttggcgataaagttgaagctgaacagagcctgatcaccgtagaaggcgacaaggcttctatggaagttccggctccgtttgctggcaccgtgaaagagatcaaagtgaacgtgggtgacaaagtgtctaccggcagcctgattatggtcttcgaagtcgcgggtgaagcaggcgcggcagctccggccgctaaacaggaagcagctccggcagcggcccctgcaccagcggctggcgtgaaagaagttaacgttccggatatcggcggtgacgaagttgaagtgactgaagtgatggtgaaagtgggcgacaaagttgccgctgaacagagtctgatcaccgtagaaggcgacaaagcttctatggaagttccggcgccgtttgcaggcgtcgtgaaggaactgaaagtcaacgttggcgataaagtgaaaactggcagcctgattatgatcttcgaagttgaaggcgcagcgcctgcggcagctcctgcgaaacaggaagcggcagcgccggcaccggcagcaaaagctgaagccccggcagcagcaccagctgcgaaagcggaaggcaaatctgaatttgctgaaaacgacgcttatgttcacgcgactccgctgatccgccgtctggcacgcgagtttggtgttaaccttgcgaaagtgaagggcactggccgtaaaggtcgtatcctgcgcgaagacgttcaggcttacgtgaaagaagctatcaaacgtgcagaagcagctccggcagcgactggcggtggtatccctggcatgctgccgtggccgaaggtggacttcagcaagtttggtgaaatcgaagaagtggaactgggccgcatccagaaaatctctggtgcgaacctgagccgtaactgggtaatgatcccgcatgttactcacttcgacaaaaccgatatcaccgagttggaagcgttccgtaaacagcagaacgaagaagcggcgaaacgtaagctggatgtgaagatcaccccggttgtcttcatcatgaaagccgttgctgcagctcttgagcagatgcctcgcttcaatagtagcctgagcgaagacggtcagcgtctgaccctgaagaaatacatcaacatcggtgtggcggtggataccccgaacggtctggttgttccggtattcaaagacgtcaacaagaaaggcatcatcgagctgtctcgcgagctgatgactatttctaagaaagcgcgtgacggtaagctgactgcgggcgaaatgcagggcggttgcttcaccatctccagcatcggcggcctgggtactacccacttcgcgccgattgtgaacgcgccggaagtggctatcctcggcgtttccaagtccgcgatggagccggtgtggaatggtaaagagttcgtgccgcgtctgatgctgccgatttctctctccttcgaccaccgcgtgatcgacggtgctgatggtgcccgtttcattaccatcattaacaacacgctgtctgacattcgccgtctggtgatgtaagtaaaagagccggcccaacggccggcttttttctggtaatctcatgaatgtattgaggttattagcgaatagacaaatcggttgccgtttgttgtttaaaaattgttaacaattttgtaaaataccgacggatagaacgacccggtggtggttagggtattacttcacataccctatggatttctgggtgcagcaaggtagcaagcgccagaatccccaggagcttacataagtaagtgactggggtgagggcgtgaagctaacgccgctgcggcctgaaagacgacgggtatgaccgccggagataaatatatagaggtcatgatgagtactgaaatcaaaactcaggtcgtggtacttggggcaggccccgcaggttactccgctgccttccgttgcgctgatttaggtctggaaaccgtaatcgtagaacgttacaacacccttggcggtgtttgcctgaacgtcggctgtatcccttctaaagcactgctgcacgtagcaaaagttatcgaagaagccaaagcgctggctgaacacggtatcgtcttcggcgaaccgaaaaccgatatcgacaagattcgtacctggaaagagaaagtgatcaatcagctgaccggtggtctggctggtatggcgaaaggccgcaaagtcaaagtggtcaacggtctgggtaaattcaccggggctaacaccctggaagttgaaggtgagaacggcaaaaccgtgatcaacttcgacaacgcgatcattgcagcgggttctcgcccgatccaactgccgtttattccgcatgaagatccgcgtatctgggactccactgacgcgctggaactgaaagaagtaccagaacgcctgctggtaatgggtggcggtatcatcggtctggaaatgggcaccgtttaccacgcgctgggtagtcagattgacgtggttgaaatgttcgaccaggttatcccggcagctgacaaagacatcgttaaagtcttcaccaagcgtatcagcaagaaattcaacctgatgctggaaaccaaagttaccgccgttgaagcgaaagaagacggcatttatgtgacgatggaaggcaaaaaagcacccgctgaaccgcagcgttacgacgccgtgctggtagcgattggtcgtgtgccgaacggtaaaaacctcgacgcaggcaaagcaggcgtggaagttgacgaccgtggtttcatccgcgttgacaaacagctgcgtaccaacgtaccgcacatctttgctatcggcgatatcgtcggtcaaccgatgctggcacacaaaggtgttcacgaaggtcacgttgccgctgaagttatcgccggtaagaaacactacttcgatccgaaagttatcccgtccatcgcctataccgaaccagaagttgcatgggtgggtctgactgagaaagaagcgaaagagaaaggcatcagctatgaaaccgccaccttcccgtgggctgcttctggtcgtgctatcgcttccgactgcgcagacggtatgaccaagctgattttcgacaaagaatctcaccgtgtgatcggtggtgcgattgtcggtactaacggcggcgagctgctgggtgaaatcggcctggcaatcgaaatgggttgtgatgctgaagacatcgcactgaccatccacgcgcacccgactctgcacgagtctgtgggcctggcggcagaagtgttcgaaggtagcattaccgacctgccgaacccgaaagcgaagaagaagtaatttttcgtttgccggaacatccggcaattaaaaaagcggctaaccacgccgctttttttacgtctgcaatttacctttccagtcttcttgctccacgttcagagagacgttcgcatactgcactccgttgctcgttattcagcctgacagtatggttactgtcgtttagacgttgtgggcggctctcctgaactttctcccgaaaaacctgacgttgttcaggacttgcgctttgaacacgctggcgggcgttatcacgttgctgttgattcagtgggcgctgctgtactttttccttaaacacctggcgctgctctggacttgcggactgaatacgctcacgcgctgcgtctcttcgctgctggttctgcgggttagtctgcattttctcgcgaaccgcctggcgctgctcagggctggcggactgaatgcgctcacgcgctgcctctcttcgctgctggatcttcgggttagtctgcattctctcgcgaactgcctggcgctgctcagggctggcggactgataacgctgacgagcggcgtccttttgttgctgggtcagtggttggcgacggctgaagtcgtggaagtcgtcatagctcccatagtgttcagcttcattaaaccgctgtgccgctgcctgacgttgggtatctcgtgtaatgactggtgcggcgtgtgttcgttgctgaaactgatttgctgccgcctgacgctggctgtcgcgcgttggggcaggtaattgcgtggcgctcattccgccgttgacatcggtttgatgaaaccgctttgccatatcctgatcatgatagggcacaccattacggtagtttggattgtgccgccatgccatattcttatcagtaagatgctcaccggtgatacggttgaaattgttgacgtcgatattgatgttgtcgccgttgtgttgccagccattaccgtcacgatgaccgccatcgtggtgatgataatcatcattgtcatgatgatgatggtcatgatcgtcgtcgtcccagtcgatgctgctgaatagtgcgtacgtggtagcaacgcccatgctatagccgaatccgcgtacaaagctgtcaacaaacggttctccggctggtggtggcagataaaccggcggatacgcagtattggcccagttcccgtaaaccacggttgggttgtagttgggaatatagaccacatcaggattggcgggctcaatggaaatgacggttgttgccggctctgtaatgacggggttggcagttaaaactgtattggatggtatgacgggtgccgtgactgtctgttttaccggtacagctttcttcgttgtggtaataactttctgttcggtactactcttcaggctgccggtttgttgcgccagttgccgcaatcgctgtacgctgtccatcacgtcctgcggctgggccagaaaagcatcgcccaggttttgcacccattgcgggttttcgcccatcaatgccatcaattgtggaaaggccaccagacttttaacgctggcgtcccacggctggtcagataccgcctgaatagcagcatcgccttgtttaagtggattatcgtggctccattgcactgcttgagcaacgtttgtcggataggtacttgccatcagcacctggctaagtagggcgtcgggatacagcgcgacgggcgcgacccattgatctatttgtgcagtgctgaatgcggatttgacgacggcgggtgttacgggaggtgcggaaaccgttgcaggaaacgtaaccgcggcagcgtcagacacagccagttgtgtgctttgcggttccacaggcgcttccactgtgcggctttttatatatagcccggtagaggcggcacaaagcccggcactgcaaattagcgccagcacatggggtttaaacggcaaagtcattttcataattcggatctcaaggaaatcgcaatggtcggcgaactgccacccgcaggtgctgtgaatccgagtataaagaggcggtagtttaaattttgactaatcttgggattcgttgagaaaggtgattatcaccatgcgaattaacgaagtttttacggagggaaacaatctctagaccatccttaacgattcagccacttttttatgttgcttttttgtaaacagattaacacctcgtcaaaatcctgctattctgcccgttgcggtactgggcatttaccctacaaactgctgtctcacaggagcgtgaagagaatcgcctgccgcactatgacaatgagagcgaggagaaccgtcgtgctagaagaataccgtaagcacgtagctgagcgtgccgctgaggggattgcgcccaaacccctggatgcaaaccaaatggccgcacttgtagagctgctgaaaaacccgcccgcgggcgaagaagaattcctgttagatctgttaaccaaccgtgttcccccaggcgtcgatgaagccgcctatgtcaaagcaggcttcctggctgctatcgcgaaaggcgaagccaaatcccctctgctgactccggaaaaagccatcgaactgctgggcaccatgcagggtggttacaacattcatccgctgatcgacgcgctggatgatgccaaactggcacctattgctgccaaagcactttctcacacgctgctgatgttcgataacttctatgacgtagaagagaaagcgaaagcaggcaacgaatatgcgaagcaggttatgcagtcctgggcggatgccgaatggttcctgaatcgcccggcgctggctgaaaaactgaccgttactgtcttcaaagtcactggcgaaactaacaccgatgacctttctccggcaccggatgcgtggagtcgcccggatatcccactgcacgcgctggcgatgctgaaaaacgcccgtgaaggtattgagccagaccagcctggtgttgttggtccgatcaagcaaatcgaagctctgcaacagaaaggtttcccgctggcgtacgtcggtgacgttgtgggtacgggttctagccgtaaatccgccactaactccgttctgtggtttatgggcgatgatattccacatgtgccgaacaaacgcggcggtggtttgtgcctcggcggtaaaattgcacccatcttctttaacacgatggaagacgcgggtgcactgccaatcgaagtcgacgtctctaacctgaacatgggcgacgtgattgacgtttacccgtacaaaggtgaagtgcgtaaccacgaaaccggcgaactgctggcgaccttcgaactgaaaaccgacgtgctgattgatgaagtgcgtgctggtggccgtattccgctgattatcgggcgtggcctgaccaccaaagcgcgtgaagcacttggtctgccgcacagtgatgtgttccgtcaggcgaaagatgtcgctgagagcgatcgcggcttcagcctggcgcaaaaaatggtaggccgtgcctgtggcgtgaaaggcattcgtccgggcgcgtactgtgaaccgaaaatgacttctgtaggttcccaggacaccaccggcccgatgacccgtgatgaactgaaagacctggcgtgcctgggcttcagcgctgacctggtgatgcagtctttctgccacaccgcggcgtatccgaagccagttgacgtgaacacgcaccacacgctgccggacttcattatgaaccgtggcggtgtgagcctgcgtccgggtgacggcgtcattcactcctggctgaaccgtatgctgctgccggataccgtcggtaccggtggtgactcccatacccgtttcccgatcggtatctctttcccggcgggttctggtctggtggcgtttgctgccgcaactggcgtaatgccgcttgatatgccggaatccgttctggtgcgcttcaaaggcaaaatgcagccgggcatcaccctgcgcgatctggtacacgctattccgctgtatgcgatcaaacaaggtctgctgaccgttgagaagaaaggcaagaaaaacatcttctctggccgcatcctggaaattgaaggtctgccggatctgaaagttgagcaggcctttgagctaaccgatgcgtccgccgagcgttctgccgctggttgtaccatcaagctgaacaaagaaccgatcatcgaatacctgaactctaacatcgtcctgctgaagtggatgatcgcggaaggttacggcgatcgtcgtaccctggaacgtcgtattcagggcatggaaaaatggctggcgaatcctgagctgctggaagccgatgcagatgcggaatacgcggcagtgatcgacatcgatctggcggatattaaagagccaatcctgtgtgctccgaacgacccggatgacgcgcgtccgctgtctgcggtacagggtgagaagatcgacgaagtgtttatcggttcctgcatgaccaacatcggtcacttccgtgctgcgggtaaactgctggatgcgcataaaggtcagttgccgacccgcctgtgggtggcaccgccaacccgtatggacgccgcacagttgaccgaagaaggctactacagcgtcttcggtaagagtggtgcgcgtatcgagatccctggctgttccctgtgtatgggtaaccaggcgcgtgtggcggacggtgcaacggtggtttccacctctacccgtaacttcccgaaccgtctgggtactggcgcgaatgtcttcctggcttctgcggaactggcggctgttgcggcgctgattggcaaactgccgacgccggaagagtaccagacctacgtggcgcaggtagataaaacagccgttgatacttaccgttatctgaacttcaaccagctttctcagtacaccgagaaagccgatggggtgattttccagactgcggtttaaaaagtcagcgcacgcgctgcgcataaacgacacaatgcccggtgaatgagattcccgggcatttttttatttctaaaccatcgccgttccgctgtttttctccggtaaggctgcgataattacatcaatggcgcaatgcgatttcggtgcattgccgggagcagaggaacacactatggattacgaatttctgcgcgatattaccggagtggtaaaggtgcgtatgtccatggggcatgaagtggtcgggcactggtttaatgaagaggtgaaagaaaacctggccttgcttgatgaagtggaacaagcagcgcacgcactgaaaggtagcgaacggtcctggcaacgggcagggcatgaatacaccctgtggatggacggtgaagaggtgatggttcgcgccaatcaactggaattcgctggcgatgaaatggaagaggggatgaactactacgacgaagaaagcctgagcctatgcggcgttgaggattttctgcaggtcgtggcggcttaccgcaatttcgtgcagcagaagtaaataaatctggcggagcctgggagctccgccagagccgttaaacagctggcatattgcgcccgtaataaatctcgcgcatttctttccacagcgcagcggtaatttcctggcgctcgctgtcggttaagtcttccggtttggtgtggaacatgtagtgcttaaggtcgaactctttaagcaacatcttggtatggaagatattttcctgatagacgttcacatccaccatgtcatacagcgccttcatatcgtcagacataaagttctgaatgctattaatctcatggtcgataaagtgcttcataccgttaatgtcgcgggtaaaaccgcgcacgcgataatcaatggttacgatatcggactcaagctggtggatcaggtaattcagcgccttcagcggagaaatcacgccgcaggtagagacttcaatatcggcgcggaaggtacataaaccgccttcaggatgactttccgggtaggtatgtacgcaaatatgacttttatcaagatgggcaacgaccgtttctggcagtgggccggggtgttctgttttgtcgatgagtttcgggtcaaccggttcttcactcaccagaatagtgacgctggcaccctgtggttcgtaatcctggcgggcgatgttaagaatattagccccgataatggaacaggtttcactcaggatttcggtcagacggttggcattatagagttcatcgatataagcaatataaccgtcgcgctcttcggcagttttggcgtagcagatatcgtaaatacaaaaactcagacttttggtcagattattaaagccatgcagtttcagttttttcaatttcttatcttctccttaggacggctgactagccagtgcgtcttgcagatactgaggtaaggcaaaagctgccgtatggattgccggattgtaataacggcatttcaggccagaggcgagaaaacgcgcctgaataatttcggtactgagatggcgtaaggcgtcgttatctgtcgcccatgcaaaagtcatgataccgccgtaataggtcgggatcgccgcctgataaaagccaacgtcgctgaagtaatggctgagtttgcgatggctgtcgatggcttcttcctgctgtaaaaagcagacgccgttttgtgcgacgaagataccgccaggattcaggcaacgtttgcagccttcataaaatgcgctagtgaaaaggctttcgccgggaccgataggatcggtgcagtcggagataatgacatcaaaggtctggctggtttgattaacgaaattgacgccatcgtcgatcaccagcttaaagcgcggatcgtcgtagctaccggcgttatggttgggtagatactgacggcagaagcttacgacacccgcatcgatttccaccatcgtgatactctcaacgtttttatgtcgggttacttcacgcagcatggcaccgtcgccgccgccgataatcagcacatgtttcgcgtgaccatgggccagtagcggaacatgggtcatcatctcatgatagataaactcgtcgcgctcggtggtttgtactacgccatccagcgccattacgcgaccaaatgcagcgttctcaaaaatgatcagatcctggtgatcggtcttttcatgatacagaacgttatctaccgcaaagtactgcccaaactggtcgtgtagcgtttcatgccactgttttttttcggccatgggttgatacctcctttgttaacacccgtaaaaaaagggcgcaacataatagctaacattgaccgcggatgcacggtcaatatttctacaaaaaggtatcagggattatttgacgtaggcaagcaggcttaaggaatcgcgggccagggctttgcattttttagcgacgggaatgccaatgccgctgagatcgcggtagctgtcttcaccgagggctttcatgtcgaaggtgtcgtaattactgaggtcccactggttttgctgagcgaaaaagaccagtgcgcgacgaatttgcccgttaggtaagttctggtaaccacaatcgttcttcagaaagacaaaaactgccgttaaatcggccatatcttcggcttcagactcgctgagcgcgtaactgtttgcgcagacggccatcaggctgccgaataacactgttctgaaaaacgtcttcattgcttctaccaggggcttaaagaagataaacgttagcacactgcgagcgaggcgacgaccattattgtcgattaaattgtgtctgcggcttgaccttcccgtaaggggaaggactatgctcaacgtttgattttgtttcgcctgcttaagaataaggaaataactatgcaacgtcgtgatttcttaaaatattccgtcgcgctgggtgtggctagcgctttgccgctgtggagccgcgcagtatttgcggcagaacgcccaacgttaccgatccctgatttgctcacgaccgatgcccgtaatcgcattcagttaactattggcgcaggccagtccacctttggcgggaaaactgcaactacctggggctataacggcaatctgctggggccggcggtgaaattacagcgcggcaaagcggtaacggttgatatctacaaccaactgacggaagagacaacgttgcactggcacgggctggaagtaccgggtgaagtcgacggcggcccgcagggaattattccgccaggtggcaagcgcagcgtgacgttgaccgttgatcaacctgccgctacctgctggttccatccgcatcagcacggcaaaaccgggcgacaggtggcgatggggctggctgggctggtggtgattgaagatgacgagatcctgaaattaatgctgccaaaacagtggggtatcgatgatgttccggtgatcgttcaggataagaaatttagcgccgacgggcagattgattatcaactggatgtgatgaccgccgccgtgggctggtttggcgatacgttgctgaccaacggtgcaatctacccgcaacacgctgccccgcgtggttggctgcgcctgcgtttgctcaatggctgtaatgcccgtagcctcaatttcgccaccagcgacaatcgcccgctgtatgtgattgccagcgacggtggtctgctacctgaaccagtgaaggtgagcgaactgccggtgctgatgggcgagcgttttgaagtgctggtggaggttaacgataacaaatcctttgacctggtgacgctgccggtcagccagatggggatggcgattgcgccgtttgataagcctcatccggtaatgcggattcagccgattgctattagtgcctccggtgctttgccagacacattaagtagcctgcctgcgttacctagcctggaagggctgacggtacgcaagctgcaactctctatggacccgatgctcgatatgatggggatgcagatgctaatggagaaatatggcgatcaggcgatggccgggatggatcacagccagatgatgggccatatggggcacggcaatatgaatcatatgaaccacggcgggaagttcgatttccaccatgccaacaaaatcaacggtcaggcgtttgatatgaacaagccgatgtttgcggcggcgaaagggcaatacgaacgttgggttatctctggcgtgggcgacatgatgctgcatccgttccatatccacggcacgcagttccgtatcttgagtgaaaatggcaaaccgccagcggctcatcgcgcgggctggaaagataccgttaaggtagaaggtaatgtcagcgaagtgctggtgaagtttaatcacgatgcaccgaaagaacatgcttatatggcgcactgccatctgctggagcatgaagatacggggatgatgttagggtttacggtataaaaagaccgtattcggaaatatgcccggatctctccgggcattaaactgatgacaaacgcaaatctgcctgatgcgctacgcttatcaggcctacgctagctgtgcaatccattgattttgcacaattttgtaggctggataaggcgttcacgccgcatccggcatgaacaacgcgcacgttgtcagcaatctgagcaagtcttacttcacatcatccggcagcgcataagccacaatatagtcgcccatcttcgtaccaaaactaccgtgaccgcctgcggagatcaccacatactgcttaccattcacttcataggtcattggcgtagcctgaccacccgctggtaaacgaccctgccacagtttttcaccgttgctcatgttgtaagcgcgcaggtagttatctgccgtagcggcgataaacagcacgttacccgccgtggagattggcccgcccagcatcggcatacccatattgaacggcaccggaaccggcatcgggaacggcatactgtcctgcggcgtaccaatacgtttcttccacaccacttcattagttttcagatccagcgcgctgatataaccccatgctggctgtttacatggcagaccaaatggactgaggaacgggttgagcgtgacaccatacggtacaccgtactgtggctgaatgccggattccgtacccgtgcctttggcatctttcggctgctccatcgggttgccaggaccacgcgggatcagtttgctaacaaacggcagtgccattgggttggcaatcgccacttcacgatttggatcaacggaaatcccgccccattcgaacatccccaggttacccgggaagaccagcgtaccctgttcagatggcggggtgaaaatgccttcatagcgcatctggtggaacatcacgcggcacaccagttggtcaaacatggtggctccccacatatccgcaccgctcaaatctttcgtcggacggaagctcagttcagaaaacggttgagttggggttacgtaatcgcctttcgctgcaccttggggaaccggtttttccggtgccggaaccaccagttcgccattacgacgatcgagcacaaaaatgttgccggttttcgccggagcgtaaataactggcactttctgaccattaacggtgatgtccgccagcgtcggctgtgccggaagatccatgtcccacaggtcgtggtgaacggtctggtagctccacgccagtttcccggtagtggcattcagcgccagaatgctgctggcataacgttcctgttccggtgtgcggttaccgccccagatatccggcgtggtcacgcccatcggcagatagaccagatccagcttcgcgtcataggccgctggtgcccaggagtttgggctgttaaaggtaaaggtgtgttcgtcagacgggattgcgttcggatctttcgcgccgggatcaaaagcccacagcagctccccggtgttgacatcaaaaccacggatcacgccagacgtttcgcgggtactgaagttatcggtaacactaccggccatcacgatggttttatcggtgataatcggtgggctagtcggttcatacagacccggtttggtgtctggcatattgctttgcagattgagcacgcctttattggcgaaggtttcgcacagtttgccgttttcagcgttaatcgcaatcagtcgaccatcattgaccggaagaatgatacgacgcgggcaatccgccatcacttccgggctagcggtttctgctttggcttcatgataagagacaccacggcaggttacgtgctggaaagactcgttggttttcagctcaggatcgtaatgccatttctctttgccgctggcggcatcaagcgcaaacaggcgctggtgagcggtacacaggtaaagggtgtcgcccactttaatcggcgtcacttcattggtgatttcacccggatcgttcggctgcttcacatcgccagtacggaacacccaggcttctttcagattatggacgttatcggcgttaatttgtttcagcgggctaaagcgttgaccttcctgattacgaccataggcaggccagtcctgatcggctacgggggagatagcttcagcaggtgtggcatcggcgcttaaggtgccgttgatctcctgcggatcgttaaatccggcccaggtcaggataccaccgctaatcagcagtgcgaccaccagtgcggcaactgcgccgctggcaggaatgaccaggcgacgccagacaaacggcaggatcagccagatgccgaagaagaccagaatgtcgctgcgcggagtcagcgcccagaagtcgaaaccaacttcccagacgccccaaatcatggtgccgagcagcagggctgcgtatagccaaagcgcggcgcgtttactgcgccacagcatccaggcgacgccgagcatcacaaggccagcgatagggtagtaccaggagccgccaatcgcgaccagccagcctccgccaatgagtagatacagcccgcaaagcgctgcaaaaagggctgttagcgtgacgagtaatcgtcggctgcctgtattgttaattgccataaagagacaccatttcaattcattaatattttagtagcaattaattataggttttaacatgtgtgatcgtcatcacaattcgagctttattaacagattccgcgaatgaatagttttactggtatactgcgtgtcttgcgctttgttgcggtgccaaaacctgcccgtgcgaagtgatttgtttttaaatcatatggttagagatatgaaacatactgtagaagtaatgatccccgaagcggagattaaagcgcgtatcgccgaactgggtcgtcagattactgagcgttacaaagacagcggcagcgatatggtgctggtgggtctgctgcgtggcagttttatgtttatggcggacctgtgccgtgaagttcaggtatctcatgaagtcgactttatgaccgcctccagctacggtagcggcatgtccaccacccgtgatgtgaaaatcctcaaagatctggatgaagatatccgtggcaaggacgtgctgattgttgaagatatcatcgacagcgggaatacactgagcaaagtgcgtgagatcttaagcctgcgcgaaccgaagagcctggcgatttgtacgctgctggataaaccgtcccgtcgtgaagtgaacgtcccggtagaatttatcggtttcagcatcccggatgagtttgtggtgggttacggcattgattacgcacagcgttaccgtcatctgccgtatatcggcaaagtgattctgctggacgagtaagtgtgaagttgccggatgtgttgcatccggcatggcatttttatttgtggttggcgtgtttcagcttgaggttggaaatcccgtgacggtaacgttgctcaagggtttcgcggttggtggcggtaacatccagatcacgcagcaagccgtcgtgaatgccgtaggcccagccgtgaatggtaactttctgcccgcgtttccacgcactttgcataatggtggagtggcccaggttatacacctgttccatgacgttcagttcacacaaggtatccagacggcgctcttgcggcatttcgccgagcaaactgctatgtttgaaccagatatcgcggatatgcagcagccagttgttgataagccccagttccgggttttcaactgcggcttgtacgccgccgcaaccgtagtggccacagataataatgtgttcaacttcgagtacatccactgcatactgaaccacggaaaggcagttcaggtcagtgtgaatgaccaggttagcaacattacggtgaacaaagagttcgcccggttcaagaccggttaaacgttctgcaggaacgcgactgtcggaacatccaatccatagaaagcgcggtttttgcgcttgtgccagtttctcaaaaaacccgggatcctcttccaccagcattttactccatagtgcattgttgctgatgagtgtatctatgtctttcatggaggttaacgacctgtaaccaaataattacgtttggctaatatagggcaactccgggacgatttaaaccacagataaagtgtaagaacgtaaggtaagtaaaaatttatgaccattgcactggaacttcaacagcttaaaaaaacctatccaggcggcgttcaggcgcttcgtgggatagatttgcaggtcgaagcgggtgatttttatgcgcttctcgggccgaacggggccgggaaaagcaccactatcggtattatcagctctctggtaaataaaacctccgggcgggtcagcgtatttggttacgatctcgagaaggatgtcgtgaacgctaaacgtcagttgggactggtgccgcaggaatttaacttcaacccgtttgaaaccgtgcagcaaattgtggtgaatcaggcagggtactacggcgtggagcgcaaagaagcgtacatccgcagcgaaaagtatcttaaacaactcgatctatggggaaaacgcaacgaacgtgcgcgtatgttatctggcgggatgaagcgccgtttaatgattgcccgtgcgttaatgcatgaacctaaactactgattctcgacgaaccgaccgcaggcgtggatattgaacttcgccgcagtatgtggggctttttgaaggatttaaacgacaaaggcaccaccatcattctcaccacacactacctggaagaagcagaaatgctgtgccgcaatatcggcattattcaacacggtgagctggtggaaaataccagcatgaaggcgctgctggcgaagctgaaaagcgaaacctttattctcgatctcgcaccgaaaagcccgttaccgaagctcgatggctatcagtatcgactggtcgataccgcgacgctggaagttgaagtgctgcgtgagcaggggatcaacagcgtatttacgcagttaagtgagcagggcattcaggtattaagtatgcgtaacaaagctaaccgtctggaagagctgtttgttagtctggttaatgaaaaacaaggagatcgcgcatgatgcatctttactgggtggcgctaaaaagcatctgggcgaaagagatccatcgctttatgcgtatctgggtgcagacgctggtgccgccagtcatcaccatgaccctttactttattatcttcggtaacctgattggtagccgtattggcgatatgcatggcttcagctatatgcagttcatcgtaccggggctgatcatgatgagcgtgatcaccaatgcctacgccaacgttgcgagtagtttttttggtgccaagttccagcgtaatattgaagagctgctggtagcgccggttccgactcacgtcattattgccggatatgtcggcggtggcgtggcgcgtggtctgtttgttggcattctggtgacggcaattagtctgttttttgtgccatttcaggtgcatagctgggtattcgttgccttaacgctggtgctcacggcggtgttgttctcccttgcgggtttgctgaacggtgtgtttgccaaaacgttcgatgacatcagcctggtgccaacctttgtgttaacgccactcacgtatttgggcggggtcttttacagtctgactttgttgccgccgttctggcaagggctgagccacctgaacccaatcgtttatatgatcagtggtttccgctacggcttcctcggtatcaatgatgttccgctggtcactacctttggcgtactggtggtctttattgtggcgttttatttgatctgttggagcctgatccaacgtggacgtggtttgcgtagctaaggctatttcctctcctctggatttgggggagaggagttttgacggctatcaccctttatcaacaatggtcagggtagactgattttcggctaaggaggaaggcgatgttaggttgggtaattacctgtcacgatgaccgggcgcaagagatactggatgcgctggagaaaaaacatggggcacttcttcagtgccgggccgtgaatttctggcgcggattaagctctaatatgctcagccgcatgatgtgcgatgctctgcatgaagcggactctggtgagggtgtcatcttcttaaccgatatagccggagcgccaccgtatcgcgtggctagtttattaagccacaaacactcccgttgcgaagtgatttctggtgtcacgttaccgttaattgaacagatgatggcttgccgtgaaaccatgaccagtagtgagtttcgcgagcgtattgtcgaactgggtgcgccggaggtgagtagtctttggcaccaacaacaaaaaaatccgcctttcgtcctcaaacataatttgtatgagtattaacccgcgattctgatggcgcttttgctacaataaaagcgttgtttcaccctcggttattttttcatgtacaaacaagctgttattctcctgctgatgctgtttaccgcaagtgtcagtgccgcgttacctgcccgttatatgcaaaccatcgaaaatgctgcggtctgggcgcaaattggtgacaagatggtgaccgtggggaatattcgggccggacaaatcattgccgtggagcccactgccgcaagttattacgcatttaattttggctttggcaaaggttttatcgataaaggtcatctcgagccggttcaggggcgacaaaaagttgaagacggtttgggcgacctcaacaagccgctgagtaatcagaacttagttacctggaaagatacgccggtctataacgcgccgagtgcgggaagtgcgccatttggggtactggcggacaatttgcgctacccgattttgcataaactgaaagacaggttaaatcaaacctggtatcagatccgtattggcgatcgactggcctatatcagcgcactggatgcccaacccgataatggcctgagcgtgctaacctatcaccatattctgcgcgacgaagaaaacacccgttttcgccatactagcacgaccacaagcgtacgcgctttcaataaccagatggcctggctgcgtgacaggggatacgcgacactgagcatggtgcagctggaaggctacgtgaagaataagatcaatctccctgcgcgagcggtggtgattacctttgatgatggcctcaagagcgtgagccgctatgcgtatcctgtgttgaaacaatatggcatgaaggcgacggcgtttattgttaccagtcgcatcaaacgtcacccgcagaagtggaacccaaaaagcctgcaatttatgagcgtttctgagcttaacgaaattcgcgatgtatttgatttccagagtcatacccattttttgcatcgggtagatggttatcgccgacccatattactgagccgtagtgagcacaatattctgtttgattttgcacgtagtcgccgcgctctggcgcaatttaatccgcatgtctggtatcttagctatccgtttggcggatttaatgacaacgccgtgaaggcagcaaacgatgccggatttcacctggcggtgacaaccatgaaaggcaaagtaaaaccgggggataatccgttgttactaaaacgactttatatcttaagaacggatagcctggagacgatgagccggctggtgagtaaccagccgcagggataacaatcaagcaacctgtaccggaatcgctttcgcggtacgtttcatttcattgtcgccttcaaaataggcgacgttgggtcgccaggtgcgagcttcttcatctggcatggtaacgaagctggcgatgatgacaatatcgccgacactggcgcagtgggccgccgcaccgttaacagaaataattctgctaccgcgttctgccgcgatggcataagtggagaaacgcttgccgttggtgacattccagatatcaatggcttcgttttcgagaataccggctgcgtcaagaaaatcctggtcaatggcgcaagaaccttcatagtgcaggtccgcatgagtcactttcacgcggtggagtttgccctgcagcatcgtgcgaatcataacttctacctttctaccctgtcgttaacgaagcaggcgatgcctgctttgaggaaattctcacgcagtattgcccgatttttgtttagtgtctactcatctgacggcatttgcgtcagcagtttgcgtaccgcgccgaagcgtgccatgtatcgcctgtaacgaattgatatttctctgaacgctgctcggtaaacaataaagaggtggctgacgatagcgcgccttgactggatactgccttcacgcaaagccacacggaagacagggaagatggatgcaccgagtaccacaccgcatgacgcggtatttaaacaatttttaatgcatgcggagacggctcgcgactttctggagatacatttgccagtggaattacgcgaactttgtgacctcaacacgcttcatttagagagcgggagtttcattgaagagagcctgaaaggacacagcacggacgtgctctattccgtgcaaatgcagggcaatcccggttatctgcatgttgtgattgaacaccaaagcaagccggataagaaaatggcctttcgcatgatgcgttattctatagccgccatgcaccggcatctggaggctgaccacgataagctgccgctggtggtgccgatactgttttatcagggcgaggccacaccttatccgctaagtatgtgctggtttgatatgttttacagcccggagctggcgcgacgcgtctataacagtcctttcccgctggtggatatcaccatcacaccggatgacgaaatcatgcaacatcggcggattgcgattctcgaactactgcaaaaacatattcgccagcgcgacttaatgttattgcttgagcaactggtcacgctgatcgacgaagggtacactagcggaagtcagttagttgccatgcaaaactatatgctgcaacgcggtcatactgaacaagcggatttgttttacggtgtgttgagagacagggaaacgggaggggagtctatgatgacgctggcgcagtggtttgaagagaaagggattgagaaggggattcagcagggaagacaggaagtaagtcaggaattcgcccagcgtcttctgagtaaaggaatgtctcgggaagacgttgcagagatggcaaatttacctcttgctgagattgataaggtaattaaccttatttaagttacctgtgttatgacagatgacgtggggtaaattaataactggcgccatcagccgtagcgccagttaagtattacgccagctcgaccattttgttgtcgatcaggcgagcatcgccaagccaggcggctaccagaattactgcccgtttgctggtttcagaaacttccagcaatgtgtcggcatcgcgaatctgaatatcatcggcgcggaagcctttttcattcagttcttgccccgcaatggtaataatttcatcgagatcccgttccccagcctgcaatttgtcagcaatgctacttaaaactttgtacagaccaggcgcaattttgcgttgttccgccgtcagataaccgttacgggaacttagcgccagaccgtctttggcgcgcataattggcacaccgacaatctcaatatcgaagcccatatcggcaaccattttgcggatcagcgccagttgctgaaaatctttttcaccgaagcaggcgatgtccggctggaccaggttgaacagcttgctgacaatagtgctaacgccgcgaaaatgtcccggacggctggcaccttccagcatggtgctaaggccaggaacgtcaacgtaagtgtgggtttcagtaccgttcgggtagatctcttttacgctaggggcgaaaactaaatccactttacgtttgtttagcttctcgcagtcctcctgcaaggtccgtggataacgagccagatcttccgggcggtcgaactgcatcgggttaacgaaaatactgacgacgaccacatcggcgcgggctttggcttcgtcgaccagcttcatatggccatcgtgcaggttacccatggtaggcaccagcgccacgcgcttgccttccatacgcaggcggcgaatttgctgacgcagcagcggcagggtttcgataattaacacaacgtgactccttaatggaaactgtgttcttcgcccggataaacgccggactccacttcagccatatactgccgcacagccgcgcggatgtcgcccgtttcggcgaggaaatttttagcgaatttaggaatgtgaccgccggtaataccaaaggcgtcgtgcatcacgaggatctgcccgtcagtgacgttgcctgcgccaatgccaataaccgggatcgccagtgcttcggtaatacgttttgccagttcaaccggcacgcattccagcaccagcagctgtgccccagcagcttctaaggctaatgcatcgctgagcagttgatcgcccgcttcatcgccgcgcccctgaactttgtagccaccgaaaatattcacactctgtggtgttaaacctaagtgaccacatacaggaacggcacgttcggtcagcatttgtacggtttctaccagccactcaccgccttcaattttgaccatgttagcaccggcacgcataaccgttgcggcgttttcgaaggcttgttccggcgtggcatacgccataaacggcaggtcagccagcagcaggcagtttggtgcgccgcgacgtacggcggcagtgtggtaggcgatatcggcaacggtaactggcagggtggagtcgtgcccctgaaccgtcatgcccaggctatcgcccaccagcatgacgttaagcccttcatcagcaaagagtttggcgaagctatagtcataagcggtgatggtcgcgaaacgttttttttcctgtttgtacttctgcagtaaggagatggtggtcggtttcataacgtatcctgataaattgatgttgtgctgtctggcattttatcagtcacattggtgggggcaatgatttatccgtagcagcactgccagaaggtgacagtgctgctacgttatcagggataggttacctggaaagtactggtggctttaaattcgccgggttcgatagcaatattcccgtcttgctttaatgttgcctggaaatgaagaggctgacttgtgccgttaccttgattagggtaaaccccatcggaggtgtcatcttcggtttcataatctatataaacagaattcgtatcattaggttttaatgtcattagcggatttttactggttgctaaaccttcaatgagtacgccaacgcctttggcggcagtgcttccagtaagcgtattaccaagcagttgtgtgttttgagtacctacttttccagtgacgagttttgtttcaatattacgcacacgaatacaattctgaaggctgatatcaaagggaacaggactagcgccatttttaattgtcccagagctatattctcccattctaaccgtactaccattgacacttggcccggtaagtatggaggtaaaacatgttggtaaggttaatttgacattattcagtgtgaaattgacataaatgtggttgctgtgatctacaacttttgtaccaggactgtaggccttaaagctataaaggtaattactactactggataactggacttgctgattaagtgtaggatcgaaattagtatctgtataaaattcaacagttatgttgtgtactataccaccaatagcccaaaacttatcgtagtcgtctgctttgttgcaacccttagtttgtagatcgctgtctgtgacggaaaagaaaaattcttggttggaaggatctccgatatagattcctgggctttgaatgtcagttattgtatcgtatgcagaccagaccctacttattaacatggtgtaatacagaccaggaacagatgtattaaatagtttatgtccgccataatctttaccactatagaccatggcattttcaatagttattggaccaggattcgctctgccagatgtattgcagtaaagaataccaccaccggtacctgtatccaggtaactccagtacatttttaccccagtcgggccgagctgcgtgggtttataaaaaaccaagttgcttgctgtacttgtgtaattaaaggtcatctgtgcggcagtggaggggcctcgatagttatcaactcctgcattatttcccacaataaaacttgtatatgcactgactgtattacaacaagaatacagtgctaaaaaaagaatgtacctgaagatagtcttcatttttactccaatgtttctttattgttatggtttgcgctgtttttgtttgttattcgtagtaaatatccactaacacatggctcataagttgaccagatgtaacactcaatgcaggatcgattttttgcattcgggtgctaaatttccaggaactaccattcatgtcatcgctcattactggataaacggaacgagatccgccactagcattaagaacattgaatgtattcgcgctatcctgagtagaaaatataactactcctacattacttgctccactgctaatttcattagcaaatatttgcctagagccagcagccatgacaccgctaagggctctaaaatcaatatgtaactgatttagcacatcgccagttccctgtaatgcacagtcggatacagtgatagtgaactcttttccacctggttgataactttcaggagtaacattaccactaaaatatcccaccccaacgacgccaagatcaatattaccctggttactgattccgcttttgcaggtgctgttttttacattggcaacaaggtcaatatcctgtccagcaatggctggacaggcgatgcaaaacagtaaactcagaaacagaattattctcttcatcagcttacgttgagtgggatgcatatatagttcctgaatctgtaagtctgttagttataggttactgtaaatgtggctggtgcagaaaacttacccgcagtgacattgtttacggttttatttttttccacgaccaggcgtgcactcatcggataataaacgaccgcattggctgcagtggagattgttacctcttgacttgctggtgttacacagctaaattgtgttgcactccctgttgccggagttacagtgctccagacttcaacggcgacagcacttgctttatctgcggctgtggaaccatttgcaaaccccgcaccgtcattagcagttccctcgcatgtggctcgcttggttaattttatttgcgcttttttattggggatacccgcacagtctttgaatttgagtttgaatgtttttactttggtcttggcattgatttcagaaatatatacatcaccaaaatcaacaacagaaatgtcctgatcagagtcatttactaatgtagcggtacaagtacccatttctacagtagtaataacggtcagtccaatactgtctgttgccgcataagagagtacgctgaacaaactggcagccaaaacgacactgctggataatccataacgtaaatttttaaatgtcatcataattatccttcttattgatagatgaaattaaacgtcgccagtgcacgaaaattccccggtacgccttgccctgcatctgtttcacgtagcgcaacggtcatttcaagacccttatcgggctgcatctcgtctgtgctccagcgtatcttttccgcactgttaggtttaaggaaagtggcatcatcagtagtccgttttttgaaacccataccgatattacttgtcgtgctagaactatcaccagactgcggtataataagcttaggactgctactacttgcatttccggtcagagtggtatcaatccaactgatgccactgctgcacccactggcaaccagtttaaaatcagcctgagattctgtcgttttattcgcgatcttatccagacccatcttagggattctcaatgtgtagttattattgccatcattcgtgacgttattaccagtaagtgtgatgttacaggttgtcgctttgacagtggctgtaaactctacattaatatccgttgcaaatacactgggacttaataatattcccatcagtatcactattttatgtggcgttgtttttatcatttgacgtcccttgtagttactgaatctgacaccgaattccattcagaataatagattgtgctattttttctgcttctgggctttgttgataatgcgcaagacaacttacgggtttactttgttcgagccatttaatgctgatatttccctgctgctcaataccacgaacaaatgcttgtccaccctgtccaacattaccaatgacattgccttgctcatcataaatatctgcagcaaatggaatatttttaccatcacttcgtgtgatgttcataatggcactttgcccttgcacggtttcaaaatcagcaaagacgacactaccctgacgcggtacagctactgcactggtactttttaattcaacatcgttctcaagatcgttgatatccagcgcgatacggttttcatgataaggagaaagagcgctggtgacaccataaccccatcgatcgatagtactgttgccataatttattcgcgctccttgagcacctggagcctgaactaccgccagtgtatcggagtcgctaaaactatcattactgaaagtcagtccaccgctatgcaatacaaaaccaccgtcggtgctgagagaaacttgacggctgttatcgctatttgcagaaatactacctgccagcgttccccatggactctcatagctggcataacccccaacataactcaaatctttgctggctttattcatcgtatagccagtattcacgctataactgacgcgagcgttatcgctatagccactgctgctaacgttgagttggttattacccttaaagtcactgcttatttgagtatcaatactctggaaaccactagtacgttgttcagtgccaagtaatttttcaattggaatggtgaaactaagataaacgctatcgtcagtgtcgccgtcttcattccaactacgctgggcactgacactgtagctgccccaggatgtactgttactgtagccaatagagtaattgctacgattttgtccggaagcccagtaatcggaccaacttccggaaagataaaaactaccgtaatcttttttctcaaatttcaacggttggttaatactgaccgtaacctgatttttcatgcgactgtaattacgcatggatttcggttcaagatcttgttcgggatgtttcacttcatcaattagagttagtgcatcattaagaccaaggtaattctgtgtgctatagcgataggccgcgatattcagactagtacttgtttcttcgaataacttgttccaggaaacacgataactttgcccctggtatgttttatcatccgggatacgaacattggaatgagtcacatcgaaagaaaatgcaccaacactagtattcagaccaagacctaacaaaccagcggtatagttattatcggttatctgaataccggtataacccgtcagatagttattcaggccgtagtagtagcttgcttgaaataaattaggctcatcctgaatatcatcttttaagacctgaccgccgctaatatcccaacgtccaacgccagggcgtaacatttgaacaacggaactgaaaggttggctgaatgtccgcttactgccatcggattcttcgatggtaacaataagatcgctgccgtacccactcggactcagatcatcaatgacgaaagcgcctggcggcaccgtcgtttcataaatcttatagccaccttgcgtaatagtgactttggcgttggtattggcaacgccatgaatgataggcgcaaagctggctaaagtcggaggcaacatgcggctgtcactgtataaacgaatgcctcggatactgacggaatcaaaggtttcgcccgtcgtataagactcaccaagaatgagttgagaacgcaggctggcgatatcacgctgaacataccgattcttaaaatcataattactgccagaatcggtcatccagttgtagttgccgctggcacgcagtcgccatgcacctaaattcatcccaccgttaaatgcagcataaatgctttcattttttcgaccaggggtttcactatgatatccgttgaggttgtaactcaacatggccgcattaatgccgttttcccataagcttggatcaacatagttttggtaatttttcattacccaggcttgaggaacgtctatatccagacgttgatcgttaacgtcataacgaacagaagcctgagggataatttccgtcaaattgaggcaattgccgagcgtttcatccctggcaagcagaacggctttttcgttatttatatcgggagaattaatatgaaactgcaataaattctttaatgtgatacaagcctgggcgttcttttttccttcaattgcgacaaatgtaatactttggttaatgattggttggtcgtttacataaacactgacgtcgtaaacacccggtatagcggggttaccttcactgtaccggctgagatcaatattagatgcattctgccccatcaggaaggtatggtcatattcaacgagttcagcactgaaagcagtattgcaatacagcagcgcgcaaaacgtggcgatacgggtcagatgatgataatttttagtatattctatagtcacgctatgcttcctgcggaattatatccttgcctgattacagcctggcattaccttcaattgcgccaccaaagtcattaatggcgtaaaaatgcacttttgcagaattcgctttgccattaaggccattgactttcatgacctcatcactaaatggtgcaatcattttcacatcaatcggatagcgtttaccgctagcttctaaatcaccactgctaaaagagacgtagtaaggggttggattggtcactcgtaaactcgccttaccttcactaccactccagaaccacttcagggctaacggggcttcagagggatttcccttcaatccatccgggcgatagaaaagttttatacgtgtgcgaaatgccagttgcagcaggctttgattcgcgaccttttctgcatctggttttggtggaacttccagtacgttaaaccagaacacgctctctctgtctttaggcagactggtgctggctgtgtacattaatttgattgtttgcccacgtttggcatcaatacggcttactggcggcgtagcagtaaaagggactgtaatactgccaggctcagcgttgtcatcgccagtatctaaccaactctggacaagcaacgggttattccctttattttccagacgtacgttgacacttttttgatcgcttttatatattacgcgagtaccgctaatgacaatgtccgcaatagagctactactaaaagccatacaggttacgaagcataaagctgttgtatgtttggtgttaaaaaacataaaccatccctgatagagttaattaaaacagggaataatataaaatagaaattattattccctgtatattcattcaatcaatttaactggtgaatacttactgataagtaatggtgtatgcagtgttagtttttacataaccagcagttgctgtttggtctgcgacggcacgaacgtaagacgctttaaaatcataaacagcagattttgtcgttgcatccagggctttagtatacacatcgccagggttgttaatttgaacctgtttgatagtggaaccatcaatattgtgtagagcgatattaacgccgtcagatgggttgttaatagacatgtcgttgttcaaagtccctttgctgttaccaaagaaaacagaaccgaaggtcattttagccgtgctacctggattcggatttgctttgctgcagtcaacggtgatgctgaaaggtttagctttagcgccaacggtgtcattcagtacgccagcatcgatttcaccaacggttgcggtttgcagcaggatcagaccatccttgttaccgccgtcaacgcgggtttcacaggtgttatcaacaaccagaccactgatatttaactgaccgccgtccatatcagcagaagcagtacctgcaaccatcgccagcataagaccagacagggcaaaacctaattttttagacataaaaatcctttaataaaattccattagtcagactacatgtttgaagaatgactattcatgacacaaataggagaaacaaatgttagatattaatgagcaatgatatttgttacccaaatttacaaccattgttcattaggtcgcctattgtgcactttagaagcttttgaacaaattaaatttacttaattcaaaattaagtaaaaataagttcacaagtgcaattggttagggtatggagatgggattgatatttatttataggaagttatattatttccgcaaagagatgtttaaactaaaatcgtaattaaggaaagagatgagatatgattttcagaaaatatttatattcgcaatataaataaattaccatttgtttaatttgtcaaatgctcttgtatgtaagatttgacgcaacatctccccatcaggaaacaccaactccggcgcgatttcaaacagcggccacagcataaatccacgattcttcatatcgtagtgcggaacggtcaggcgttcagtatttatcacttcattaccaaacagcatgatgtcgagatccagcgtgcgtggtccccagcgttcagctttgcggacgcgaccttgctgcaattcaatacgctgtgtgtgattgagtagctcttcaggtgcaagagaggtttccagcgccacggctgcgtttaagtaatcgggttgatcttgcggccccagcggtggggtgcggtaaaagctagaaacggtaagaatgtggctttcagggatatcgcctaatgctttcagggcagcattgacctgctccagcggagaggccagattgctgcctatggcaatatacgccactgtcatgcggtaccctcacgacgtggtgcgcgtttgcgtggacgacgagtacgacgacgcggactcggttcttcatccagctcgttgagcatccctttttggtctggtggcgcggaaacctggaactcaccccaccatttcaccagacgctgcagttcagcgttacgctcaacttcagctcgcaaggccaacaggtcataagccgcacggaacttaggatgctccagcagtttccatgcgcgtttaccctgacgacgggacatacgcaactgcaactgccagatatcgcgggttaatgtcgtcagacgtttcgggattgccagactacggcaggcttcgtccagcacgtcgttcatcgccagcgcgaaagcgtcgtgataggtcaggccgctttcctgggcgatcttctgtgccgtctccagcagtgggtaccagaacatggcggcaaacaggaacgccgggttcacgcgcatatcgttatggatacgcgtatcggtattcttcagcacctgttcaatgatccgctccatcgggctgtcgccattttccgtgaagtagcgggtaatggtcgggaacagcggctggaacagatgatattcacacaacagcttataggtttcgtaaccgtagcccgcttgtagcagtttaaggctttcttcaaacaggcgtgccggtgggatatcgttcagcagggtagcgaggcgagggatcggttctgcggtttccgggctgatgcgcatacccaatttggcggcaaaacgtaccgcgcgcagcatacgtaccggatcttcacggtagcgcgtttccgggttaccaatcagacggataacgccgtccttcagatccttcatgccgccaacgtaatcacggacggtaaaatccgctacgctgtaatacaggctgttgatagtgaaatcgcggcgctgggcgtcttcttcgatggagccgaaaatgttgtcgcgcagcaacatgccgttttgcccgcgttgggaggtcgtgcggtcgctgacgttaccttcgtggtgtccacggaaggtcgcaacttcgataatctccgggccaaacattacatgagccagacggaaacggcgacccaccaggcggcagttacggaacagtttgcgcacctgctcaggcgtggcgttagtggttacgtcaaaatctttcggctttttgccaagtaacaggtcgcgcacgccgccgccaaccagccaggcttcgtatcccgctttattgagcctgtacattaccttcagggcattttcactgatatctttgcgggaaatagcatactgctcacgcgggatcaccgtcacctgtggacgggcgactgcctgttcagcctcgctttcctcgcggcttagcaccttgcggcaaaaattagcgactcgggtaaaaatagtacacctcggtagtgtcaaacatcattcaggacaaaaaaatagcggctaatcatagctcagcaactcgcattactgaatgtactatttacaattgcgctctcgggcacggcggtaagccgccagtttttgacggcactctgaaggatttgctcgacgctgaaatcctgccagtgtgcttctgcctgctgccccagaaattgaagtgccgcgattagtaccgggcgtggatcgcctttcggcaacgcaggcgcatgattctgcttggaaagtttagcgccttgtggattaagcgccagcggcagatgaatgtaatctggcactttccagccaaaaagctggtacaggctgatttgccttactgttggttcaatcagatcagccccacgcactatttctgtaacgccctggaaatgatcatcaaccacaacagccaggttgtaggcgaacaacccatcacggcgatgaatgataaaatcttcccgtgccagtttttcgtcggcgtgaataatgccgcgcagctggtcagtaaattgcgtgaccggatgctgctggcggatacgcactgcggcgttgtctggtccatgatgcaacacccggcaatgaccgtcgtaaataccgccaatgctttgaatacgcgcacgcgtacaggtgcagtaataacttagtccttgttcatgtaaccaggcgagtgcttcacgataggcgtcgtgacgttggctttgccagagaacatcgccgtcccagtgcagaccgtaatgttccagctggcgcaggatagtttctgcggcaccgggaacttcacgaggcgggtcgatatcttctatgcgtaccagccagcgaccttgccgggcgcgagcctgcaaatagctgccgagcgcggcgatcagagagccaaaatgaagctcgccggaaggagagggggcgaagcggccaatatactgtgtgtctgtcatctctttgaacaaaaaataaggcgggagcatttcccgcctgtggtaaacgtgatggaacggctgtaattagccagccatctgtttttcgcgaatttcagccagcgttttgcagtcgatgcacagatcggctgtcgggcgcgcttccagacggcgaataccaatttcaacaccgcaggattcgcagtagccgaaatcttcgtcttccacttttttcagcgtcttctcgatctttttgatcagcttacgctcgcgatcgcggttacgcagttcgaggctgaactcttcttcctgggctgcacggtctaccgggtccgggaagttggctgcttcatcctgcatatgtgtaacggtgcgatcgacttcatccctgagttgattacgccatgcttccagaatacgacggaagtgcgccagctgggcttcattcatatactcttcgcccggcttctcctgatatggttccaccccagcgatggcgagaatactcagggagcttgttttacggttttgcccttcttgcatgttgcttctccttaacacgcactatcgatccccatgttcgggggaaaaatgaggccgctataaatagcagatgcttttccggatagcaattatctaaacgtaacacttgacaactgtgtgaggaaaagcgtatttgcgcacgcgaccagaatgtaaattaaccagttacttactttattacaatgtaaccggcagactttttttaagagccatgccttcagcagaaatttccgctttgtaagccagaatttctacccccctctgttgagcttcactcaatagttgcgcgtatttctcatcgatgtggcgcgcgggactaaaccgtgtaatggcactatgcagcacggcgaaaaagataaccgcacgctggccttcagccgctacgctcatcaactcccgaaggtgtttctgacctcgttcagtgaccgcatcgggaaaatatccctgttcgttctccgctaacgtaacgcttttcacttcaatatagcagtctggacggctatccgcctgcaacataaagtcaatacggctgcgttctgcgccgtattttacttcgcttttcaggctgctatagccactcagttcactaatactttcattaaggatagcctctttcgtcaacctgttagcccaaagcgtgttgacgcaaataaatgcgccgctctggctttgagttaattcccaggtgtgtgggtatttccgtttggtgttgtcactagtgctataccagacggtatcgccaggcgttgcacaaccggtcatcgcacccgtattcgggcagtgtagcgttaattcgcgaccatcgggtgtgatcacatcggctaaaaaacgtttgtaacgctgaattagcgtcgcgcgctgtagagggggagaaaattccattgcgacaatccttgttattgcgttagcgcccagcgttttagcggcgtgtagcgtgtgcgtccacgggcaaagctggaggcgtaaagggtgaactccgtcaccgcatagctccagttaaaacctggcggcgggattgtcaccgcctcgctggcgtcgcgcaataaggtaatatgtggatgaaacggacgattgctttgaaaacaaccgctgcgggcagcctgactacggagcatattcgccagctggattaagccgcgtggcggctgacgcatccctaaccacaccacacggctacgcagccattgtccggcgtcatcaagcgtgagtgtgaaaccaggttgacgaatccgtccggctaaaagagaaagcgccttctctttctcggcgctcacttcgcctaaaaatgccagagtcagatgcaaattatcggcggcgaccggacgtcccgcctcaggtgggaagtgtgtggcgcgccaatggataatctgttcgcggatttctgcaggtaagtcgatagcaaagaacagacgttgcggttcagacatgtgaggcactcggttatgaattaccgcgatgctacaatgtggcgcgaagaatgttaaccctctggagcgttttgtgagcagcttgcccgttgctgccgtcttacctgaattacttaccgctctcgattgtgcgccgcaggtattattaagtgcgccgaccggggccgggaaaagtacctggctgccgctgcaactgctggcgcatcccggcattaacgggaaaattatcctgctggagccgcgtcgtctggcggcgcgtaacgtcgcgcaacggctggcggagctgcttaacgaaaagccaggcgataccgttggctaccggatgcgtgcgcaaaactgcgtcgggccgaatacccgcctggaagtggttaccgaaggcgtgctgacgcgcatgatccagcgtgacccggaactgagcggtgttggactggtgatccttgatgaatttcatgagcgcagcttgcaggcggatttggcgttggcgctgttactcgatgtgcaacaaggtctgcgtgatgaccttaaactgctgattatgagcgctaccctggacaacgaccgcttgcagcaaatgctgccagaagcgcctgtcgtcatcagtgaagggcgcagctttccggttgaacgccgttatttaccgctgcccgcgcatcagcgttttgacgatgccgttgcggtagccaccgctgaaatgctgcgtcaggaaagcggaagtttactgttatttttacctggcgtcggagaaattcagcgtgtgcaggaacaactggctagccgcatcggcagtgatgtattgctctgcccgctgtatggcgcgttgagcctgaacgatcagcgaaaagcgatcctcccggcaccgcaagggatgcgcaaagtggtgctggcgaccaatattgctgaaaccagtttaaccattgaaggtattcgtctggtggtggattgtgcccaggagcgtgtggcgcgttttgatccgcgcacggggcttacgcgactgattactcaacgcgttagccaggcatccatgacgcagcgtgccgggcgcgccgggcgtctggagccgggtatcagcctgcatttaatcgccaaagaacaagcagaacgcgccgcggcgcaaagtgaaccggagatcttacaaagcgatctttccggtttgctgatggaattactgcaatggggatgcagcgatccggcgcagatgagctggctggatcaaccgccagtagtgaatctactggccgcgaaacgtctgttacaaatgctgggggcactggagggtgaacggcttagtgcgcaagggcaaaaaatggcagcgctgggtaacgatccgcgtttagcggcaatgctggttagcgcgaagaacgacgacgaagctgctaccgcggcaaaaattgccgccattctcgaagagccgccacggatgggcaatagtgacctgggcgtggcgtttagccgcaatcaaccagcctggcagcaacgtagtcagcaactgttaaaacgcttaaacgtacgtggcggtgaggcagacagtagccttatcgcgccgctacttgccggggcgtttgccgatcgcattgctcgtcgccgtgggcaagatggacgctatcaactggcaaacggcatgggagcgatgctcgatgccaacgacgcgctaagccgccacgaatggttgatcgcaccgttattattgcagggcagcgccagcccggatgcgcggattttactggcgctgctggtcgatattgatgagttagtacaacgctgcccgcagctggtacagcagtctgacactgtggagtgggatgacgcgcaaggtacgctgaaagcctggcgtcggctacaaatcggtcagttgacggtgaaagtgcagccgctggcgaaaccgagtgaagacgagttgcatcaggcgatgcttaatggcatccgtgataaaggtttaagcgtgctcaactggacggcggaagcggaacagctacgcttgcgtttgttatgcgccgcaaagtggttgccggaatatgactggccagcggttgatgatgaaagtttattggcagcgctggaaacgtggctgctgccacatatgactggcgtacatagtctacgcggcctgaaaagtctcgacatttatcaggcactacgcggattacttgattggggaatgcagcaacgtctggatagtgaattgcctgcgcattacactgtgccgacgggaagccggatcgccattcgttatcatgaagataacccgcccgcgctggcggtgagaatgcaagagatgtttggcgaggccaccaatccgacgatcgcccaggggcgcgtgccgctggtgctggagttgcttagtcctgcccaaaggccattacaaatcacacgagatttgagcgacttctggaaaggagcgtaccgtgaggtgcaaaaagagatgaaagggcgttatcccaaacatgtctggccggacgacccggcaaatactgcaccgacgcgacggacgaaaaagtatagctaaggttggttttctccctctccctgtgggagagggccggggtgagggcatcagcgcgcacgttcaccctcaccctaaccctctccctcaagggagaggggaccgatcgagcacaaattttgagagatatcttcttctgtcttgtaacagaagaacagaaaatcgggcttttgcgcctgaatattgcggagaaaaagcatggccgggaatgaccgcgagccaattggacgcaaagggaaaccgacgcgtccggtcaaacaaaaggtaagccgtcgtcgttacgaagatgacgatgattacgacgattatgatgactatgaggatgaagaaccgatgccgcgcaaaggtaagggcaaaggcaaagggcgtaagcctcgtggcaaacgcggctggctatggctactgctaaaactggctatcgtttttgccgtgctgatcgccatttacggcgtttatctcgatcaaaaaattcgtagccgtattgatggcaaggtctggcaactgcctgcggcagtttatggccgaatggtcaatcttgagccagacatgaccatcagcaagaacgagatggtgaagctgctggaggcgacccagtatcgtcaggtgagcaaaatgacccgtcctggcgaatttaccgtgcaggccaacagcattgagatgattcgccgtccgtttgatttcccggacagtaaagaaggacaggtgcgcgcgcgtctgacctttgatggcgatcatctggcgacgatcgtcaatatggagaacaaccgtcagttcggtttcttccgtcttgatccgcgtctgatcaccatgatctctagcccaaacggtgagcagcgtctgtttgtgccgcgcagtggtttcccggatttgctggtggatactttgctggcgacagaagaccgtcatttttacgagcatgatggaatcagtctctacagtatcggacgtgcggtgctggcaaacctgaccgccggacgcacggtacagggtgcgagtacgctgacgcaacagctggtgaaaaacctgttcctctccagcgagcgttcttactggcgtaaagcgaacgaagcttacatggcgctgatcatggacgcgcgttacagcaaagaccgtattcttgagctgtatatgaacgaggtgtatctcggtcagagcggcgacaacgaaatccgcggcttcccgctggcaagcttgtattactttggtcgcccggtagaagagctaagcctcgaccagcaggcgctgttagtcggtatggtgaaaggggcgtccatctacaacccgtggcgtaacccaaaactggcgctggagcgacgtaatctggtgctgcgtctgctgcaacagcaacagattattgatcaagaactctatgacatgttgagtgcccgtccgctgggggttcagccgcgcggtggggtgatctctcctcagccagcctttatgcaactggtgcgtcaggagctgcaggcaaaactgggcgataaggtaaaagatctctccggcgtgaagatcttcactacctttgacagcgtggcccaggacgcggcagaaaaagccgccgtggaaggcattccggcactgaagaaacagcgtaagttgagcgatcttgaaactgcgattgtggtcgtcgaccgctttagtggtgaagttcgtgcgatggtcggaggttctgagccgcagtttgcgggctacaaccgtgcgatgcaggcgcgtcgtagcattggttcccttgcaaaaccagcgacttatctgacggccttaagccagccgaaaatctatcgtctgaatacgtggattgcggatgcgccaattgcgctgcgtcagccgaatggccaggtctggagtccgcagaatgatgaccgtcgttatagcgaaagcggcagagtgatgctggtggatgcgttgacccgtagcatgaacgtgccgacggtaaatctggggatggcgctggggctgcctgcggttacggagacctggattaaactgggcgtaccgaaagatcagttgcatccggttccggcaatgctgctgggggcgttgaacttaacgccaatcgaagtggcgcaggcattccagaccatcgccagcggtggtaaccgtgcaccgctttctgcgctgcgtagcgtaatcgcggaagatggcaaagtgctgtatcagagcttcccgcaggcggaacgcgctgttccggcgcaggcggcgtatctgacactatggaccatgcagcaggtggtacaacgcggtacgggtcgtcagcttggggcgaaatacccgaacctgcatctggcagggaaaacagggactaccaacaataacgtagatacctggtttgcgggcattgacggcagcacggtgaccatcacctgggtcggccgtgataacaaccagccgaccaaactgtatggtgccagcggggcaatgagcatttatcagcgttatctggctaaccagacgccaacgccgctgaatcttgttccgccagaagatattgcagatatgggcgtggactacgacggcaactttgtttgcagcggtggcatgcgtatcttgccggtctggaccagcgatccgcaaagcctgtgccagcagagcgagatgcagcagcagccgagtggcaatccgtttgatcagtcttctcagccgcagcaacagccgcaacagcaacctgctcagcaagagcagaaagacagcgacggtgtagccggttggatcaaggatatgtttggtagtaattaacatctaagcgtgaaataccggatggcgagttgccatccggtaaaataacatcccatctaagatattaaccctttcttttcatctggttgtttattaacccttcaggaacgctcagattgcgtaccgcttgcctgtaagactcaatgtaagccgtgccaaaatatgatggctaggacgagctagaacccgccagcgtttcgaatattatcttatctttataataatcattctcgtttacgttatcattcactttacatcagagatataccattccatataacggccctgtacgcctggacggataaagcgtttacgcgacaacggatgcccgatgcgacgctggcgcgtcttatcgggcctacaaacggccccgaatcgtaggtcggataaggcgttcacgccgcatccgacaaaccatgctggatcacaacttcgcaaacacccgacgtgcagcatcgatggtgttattgatatcttccatgctgtgcgccacggacataaagcccgcttcaaacgcactcggtgccaggtaaacaccttcgtccagcatcatatggaagaaacgcttaaagcgttccacgtcacaggccatcacatcctgatagcacgtcacggactcggcgtcggtaaagaaaataccgaacatgccgccaacgtggttaacgaccagcggaattccggcttcttctgccgcttccagcagaccttctgccagacgtgttgtcagctcatccagcgtttcgtgaacgcccggctgcgcgacttcattcagacaggcgaaacccgctgccatcgcaatcgggttaccggaaagcgtacccgcctgatagaccggacccgtcggggccagcgcatccattacatcacgacgaccaccgaatgcgcctaccggcattccaccgccgatgattttgccgaggcaggttaaatctggcactacgccgtaataatcctgtgcgccagctagcgctacgcggaaaccggtcatcacttcatcgatgatcagcaacgcgccaaattcgtcgcacagcgcgcgcagacctggcaggaactctggcagcggcggaacacagttcatattgcctgccaccggctcgacgataatacaggcaatctcttgcgggtattgctcaaatgcggcgcgtacagaagccagatcattataagtacaggttaaggtatatttggcgaaatctgccggaacgcccgggctgtttggctggcctaacgtgagtgcgccagaaccggctttcaccagcaggcagtcagcgtgaccatggtaacacccttcaaatttaataattttgtcgcgaccggtaaaaccacgggccaggcggatggcgctcatggtcgcttcagtgccggagttcaccatgcgcaccatatccatggtcgggaccagttcggtcaccagttgcgccattttcacttccatttcggttggtgcaccaaagcttaaaccacgctcggcggcttcaatcacggcattgcggattgccggatggttatggcccagcaccatcggcccccaggaaccgacataatcgatataggctttgccatcaacatcgtacagataagcgccgtccgctttttcgataaacagtggagtgccgcccacgccagtaaaggcgcgaacaggggagttcacaccgccagggatcagctcgcgcgctgcgctgtaaagattttcagacttactcatggagggttcctgattcgtagaaaaagtgaatggctgctattctatgttattcataacaagttaaatactcgtcaaacatcaggctgcttgtactggtgcaatcctgatttcttagagtataaaagttttgtgcatttgaaacattacgctttgcaaaggattttcatggaacgtgcgagtaaaatgccgtcatcttatttgtatgaccaataagtgatcattggatgaaaactgatactccctctttagaaacaccgcaggccgcgcgcctgcgacgcagacaactgattcgccaacttcttgagcgcgataaaaccccgttagccattttgtttatggcggcagtcgtcggcacgcttgttgggctggcagcggttgcttttgacaaaggtgtcgcctggttgcagaaccaacgtatgggggcgctggtacatactgctgataattatccgcttctgttaaccgtcgcttttctctgtagcgcggtgctggcgatgtttggctactttttggtgcgcaaatacgcgccggaagcaggtggtagcgggatcccggaaattgaaggggcgctggaagatcaacgtcccgttcgctggtggcgtgtattgccggtgaagttctttggcgggctggggacactcggcggaggcatggtgttggggcgcgaagggccaaccgtgcagatcggcggtaacattggccgtatggtgcttgatattttccgcctgaaaggtgacgaagctcgccatacgctgctggcaaccggtgctgctgcggggctggctgcggcctttaacgcgccgctggcgggtattttgtttattatcgaagagatgcgtccgcagtttcgctatacgttaattagcattaaagcggtatttattggtgtcattatgagcaccattatgtaccggatttttaatcatgaagttgcgttgattgacgtcggtaaactttctgatgcgccgcttaatacgctgtggctttatctgatcctcggtattatttttggcattttcggccctatttttaataaatgggtgctggggatgcaggatttgctgcaccgtgtgcacggcggcaatattaccaaatgggtgctaatgggcggtgcgattggcggtctgtgtggattgctggggtttgtggcaccagcaacgagcggcggcggttttaacctgattcctatcgctaccgcggggaatttcagcatgggaatgctggtgtttatcttcgtcgcgcgggtcattaccaccttactctgcttctcttccggcgcgccgggcggtatttttgccccgatgctggcgctgggtactgtgctgggaaccgctttcggaatggttgccgttgagctgtttccgcaatatcaccttgaggcggggacgtttgctattgccggaatgggggcattactggcggcatctattcgcgcgccgttaacggggatcattctggttctggagatgaccgataactaccagctcattttgccaatgattattaccggtcttggcgcaacactattagcgcaatttaccggcgggaaaccgctatacagcgcgattcttgcgcgcacgctggcaaaacaggaagctgagcaactggcgcgaagcaaggccgcaagtgccagcgagaatacttgaacgaaataccagggtattagataatggcgattattattgggttagaatttgcccaattgccgatgtcgtttggagcaaaatatgagtgatgacgtagcactgccgctggagtttaccgacgcagcagccaacaaagttaaaagcctgatcgctgacgaagataacccgaatctgaaattacgcgtgtatatcaccggtggcggttgcagcggcttccagtatggtttcacctttgatgatcaggtgaacgaaggcgatatgaccatcgaaaaacagggcgttggcctggtggttgatccgatgagcctgcaatatctggtcggcggttccgttgattataccgaaggtctggaaggttctcgtttcatcgtgaccaacccgaacgcgaaaagcacctgcggttgcggttcttcctttagtatctaatctgttgttcatgtgccggataaactatccggcacatcttctctcttcaacgcccattctcatccagcgcaaacgtcggtagcttaagatgccaacgaatagccgccagccgaatcaatagcgtcacgaccatgcccatcatactggctgtttccagtggtacggaaaatgtgtaataagccgtagcgtggacaataccgccgataatacaggcagttgcgtagatttctgtacgtaaaatcatggggatttcgcgggccagaacatcacgaatgatcccgccgccaacgccagtaatgacgcccatacaaaccgcgattaacggaccggcttccgcattaaaggctttattcacgccaatgccgacaaacaccgccagaccaacggcgtccagcaccggcaacatccattttggtaagcgtcttggctggcgcaccagcacgatggtcagcatgctggtgaccattgcaacgaccagatcggtgggatctttcacccaaaataccgggccgtgatccagcgccatgtcgcgaattgtcccgccgcctactgcggttaccacgcccagtaccagaacaccaaaagggtccatacgcaattttccggctaacaaaacgccggagatggcaaataccgctgtgccgactatattcagccaatagacgagcattgttcaatccccactgagcacctgaaaaggtcaggcgttaatctacctgactaagcgcattacagagctgttgtgcagcgaggataatacgtgggcttgcacgttcaaaccagtcactcgtgagaggaataacgggaattttgagctgttcaccccagtattgtttgattttaggaatttggtccggtccgcctgtaatgacaatcgcctgtgggctgcgtgctaacacctgttcgcggctaacttgcggccagggaacccggctgtctttaaagatgttttctccgccacaaacttcgagtacctggttctgaatgctctcttttccactggtaaatggcggattaatgccgaattgcagaaaaacacgttttttaggtttatcagcatattgcgctttcaattgcgcgtactgatccagcagggattgcgcggcttgttcggccttgtctggttgcggactccagggggccagttgacgtaacgcattggcaatttgttcaatgcttgtcgcatcgacccacatcacttttattcccaggctagccagctggtcaacctgccgctcggcattacctccacgccaggcaatcaccagatcgggtttcagcgcgacaatgcgttccagattcatcccctgccaggtggaaacctgctcaatcttttgcgcttgtggaggatagtcggaatagctgctgaccccaaccggcgtgatcccggcggcaaaggcaagttcagtgttggcgggagaaagcgtgatgacgcgcggcgcggcgttgagccacagtggcgcaagaaaagacagggcgaccagcgccctgaacagactcttagccatgtgcaagtttctgcaccagactctcaaccatcaggctggactgtttagcggcaacagccaggaactcatcgaagctaagatgagactgttgatcggccacgtcggagatggcgcgtacgacaacaaacgggacgttgaaattgtggcagacatgggcgattgccgtcgcttccatctctacagcaatggcctgtgggaagttgtggcggattttcgccagaccaacagaaccgttgatgaaagcgtcgccgctaacaatcaggccacgtacagcgttaagattcagttcggcaatgcaggcctcagcggcagcgatcagtttatcgtcagctttaaagcctgccggacagcctggtaactgaccgtattcataaccaaatgccgtgacatccgcgtcgtgataacgtgcttcgtcgctgacaacgatatcgcccactttcaacgttggtgccaggccaccggcagaaccggtgttaataatcacatctggcttgcagtgttccaacagcaaagtggcacccagcgccgcagcgactttaccgatgccgcttttcagaagcgcaacctcggttccattcagttggccggtatagatttcgcaaccgccgagactgatagtttgacggttttcgattttgtcacgcagcagcgtaacttcttcttccattgcaccaatgatgccgattttcatagatttactcgcgataagcccgatttgaaggcatagtttaccatgcgcttacggggaagcgtatttctcacgcgggagaggacatggcacagattgatttccgaaaaaaaataaactggcatcgtcgttaccgtagtccgcagggcgttaaaaccgaacatgagatcctgcggatcttcgagagcgatcgcgggcgtatcatcaactctccggcaattcgtcgtctgcaacaaaagacccaggtttttccactggagcgcaatgccgccgtgcgcacgcgtcttacccacagcatggaagtccagcaggtggggcgctacatcgccaaagaaattttaagccgtctgaaagagcttaaattactggaagcatacggcctggatgaactgaccggtccctttgaaagcattgttgagatgagttgcctgatgcacgatatcggcaatccgccgtttggtcattttggcgaagcggcgataaatgactggtttcgccaacgtttgcacccggaagatgccgaaagccagcctctgactgacgatcgctgcagcgtggcggcactacgtttacgggacggggaagaaccgcttaacgagctgcggcgcaagattcgtcaggacttatgtcattttgaggggaatgcacaaggcattcgcctggtgcatacattgatgcggatgaatctcacctgggcacaggttggcggtattttaaaatatacccgtccggcgtggtggcgtggcgaaacgcctgagacacatcactatttaatgaaaaagccgggttattatctttctgaagaagcctatattgcccggttgcgtaaagaacttaatttggcgctttacagtcgttttccattaacgtggattatggaagctgccgacgacatctcctattgtgtggcagaccttgaagatgcggtagagaaaagaatatttaccgttgagcagctttatcatcatttgcacgaagcgtggggccagcatgagaaaggtagcctctttagcctggtggttgaaaatgcctgggaaaaaagtcgcagtaatagtttaagccgcagtacggaagatcagttttttatgtatttacgggtaaacaccctaaataaactggtaccctacgcggcacaacgatttattgataatctgcctgcgattttcgccggaacgtttaatcatgcattattggaagatgccagcgaatgcagcgatcttcttaagctatataaaaatgtcgctgtaaaacatgtgtttagccatccagatgtcgagcggcttgaattgcagggctatcgggtcattagcggattattagagatttatcgtcctttattaagcctgagcttaagtgactttactgaactggtagaaaaagaacgggtgaaacgtttccctattgaaagccgcttattccacaaactcagcacgcgccatcggctggcctatgtcgaggctgtcagtaaattaccgagtgattctcctgagtttccgctatgggaatattattaccgttgccgcctgctgcaggattatatcagcggtatgaccgacctctatgcgtgggatgaataccgacgtctgatggccgtagaacaataaccaggcttttgtaaagacgaacaataaatttttaccttttgcagaaactttagttcggaacttcaggctataaaacgaatctgaagaacacagcaattttgcgttatctgttaatcgagactgaaatacatgaaaaaaaccacattagcactgagtgcactggctctgagtttaggtttggcgttatctccgctctctgcaacggcggctgagacttctagtgcaacgacagcccagcagatgccaagccttgcaccgatgctcgaaaaggtgatgcctagtgtggtcagcattaacgtagaaggtagcacaaccgttaatacgccgcgtatgccgcgtaatttccagcagttcttcggtgatgattctccgttctgccaggaaggttctccgttccagagctctccgttctgccagggtggccagggcggtaatggtggcggccagcaacagaaattcatggcgctgggttccggcgtcatcattgatgccgataaaggctatgtcgtcaccaacaaccacgttgttgataacgcgacggtcattaaagttcaactgagcgatggccgtaagttcgacgcgaagatggttggcaaagatccgcgctctgatatcgcgctgatccaaatccagaacccgaaaaacctgaccgcaattaagatggcggattctgatgcactgcgcgtgggtgattacaccgtagcgattggtaacccgtttggtctgggcgagacggtaacttccgggattgtctctgcgctggggcgtagcggcctgaatgccgaaaactacgaaaacttcatccagaccgatgcagcgatcaaccgtggtaactccggtggtgcgctggttaacctgaacggcgaactgatcggtatcaacaccgcgatcctcgcaccggacggcggcaacatcggtatcggttttgctatcccgagtaacatggtgaaaaacctgaccagccagatggtggaatacggccaggtgaaacgcggtgagctgggtattatggggactgagctgaactccgaactggcgaaagcgatgaaagttgacgcccagcgcggtgctttcgtaagccaggttctgcctaattcctccgctgcaaaagcgggcattaaagcgggtgatgtgatcaccagtctgaacggtaagccgatcagcagctttgccgcactgcgtgctcaggtgggtactatgccggtaggcagcaaactgaccctgggcttactgcgcgacggtaagcaggttaacgtgaacctggaactgcagcagagcagccagaatcaggttgattccagctccatcttcaacggcattgaaggcgctgagatgagcaacaaaggcaaagatcagggcgtggtagtgaacaacgtgaaaacgggcactccggctgcgcagatcggcctgaagaaaggtgatgtgattattggcgcgaaccagcaggcagtgaaaaacatcgctgaactgcgtaaagttctcgacagcaaaccgtctgtgctggcactcaacattcagcgcggcgacagcaccatctacctgttaatgcagtaatctccctcaaccccttcctgaaaacgggaaggggttctccttacaatctgtgaacttcaccacaactccatacatcttcatcatcctttaggcatttgcacaatgccgtacgttacgtacttccttatgctaagccgtgcataacggaggacttatggctggctggcatcttgataccaaaatggcgcaggatatcgtggcacgtaccatgcgcatcatcgataccaatatcaacgtaatggatgcccgtgggcgaattatcggcagcggcgatcgtgagcgtattggtgaattgcacgaaggtgcattgctggtacttagtcagggacgagtcgtcgatatcgatgacgcggtagcacgtcatctgcacggtgtgcggcaggggattaatctaccgttacggctggaaggtgaaattgtcggcgtaattggcctgacaggtgaaccagagaatctgcgtaaatatggcgaactggtctgcatgacggctgaaatgatgctggaacagagccggttgatgcacttgttggcgcaggatagccgtttgcgggaagaactggtgatgaacctgattcaggcagaggagaatactcccgcacttactgaatgggcgcaacggctggggatcgatctcaatcaaccgcgagtggtggctattgttgaggtcgacagcggtcagcttggcgtggacagcgcaatggcggagttacaacaactgcaaaacgcgctgactacgcccgagcgtaataatctggtggcgattgtcagcctaaccgaaatggtggtgttgaaaccggcgttgaactcttttgggcgctgggatgcagaagatcatcgtaagcgagttgaacaactgattacccgcatgaaagagtacggccagctgcgttttcgcgttagtctgggcaactattttaccggtcctggcagtattgcccgatcctatcgtacggcgaaaacgacgatggtggtgggtaaacagcggatgccagaaagtcgctgctatttttatcaggatctgatgttacctgtgttactcgacagtttgcgtggcgactggcaggccaacgaactggcgcgaccgctggcgcggctgaaaacgatggacaataacggcttgctgcgacgaacgctggcggcgtggtttcgccacaatgtgcaaccgctggcaacgagtaaggcgttgtttattcatcgtaataccctggagtatcggcttaatcgtataagcgaactgaccgggcttgatttgggcaattttgatgacaggttgctgctgtatgtggcgttacaactggatgaagagcggtaagttatgcgttaaggttgaggcggcgctggctcattcccctcagcccgaagggtagaggggaatgcccgaattaaccgtcagttcgggattatttacgcgttagtttttccagatcggcttcaatctcgctgatcttattggttacgacactctccaggtgacgtaagtcgtcgaggatcttacgcttaagatcaacttcgctgcggtcacgctggcagatttgatcaagctcatcaatgatataccgtagattcgggctgatttcctggacttctttataaccctgacccacaccatcagcgacgaccgttttacgctgacgcggatatttaaacttaacgctcttggcgaaaaactcgcctttgtctttctggaaatagattttcagaatatcgttgttggcttcctgccggaggctgtaacgatcaatttcttcaggattggtaatacccagacttttcagattgtcgtacatagcgttacctcaaaatgagtcagtaaattgtgcttattttagcatttggcctggcccgcccggctcgactgtgatcgcagaaagcctttttcttccagacttctatcatggcgtaaaaatcaaaaaattacctgctttattctggtgataaaattcacgatttacaccagttccagcatcgttacttccgggcggcagttcagacgcaaaccatacaaactgcccacgccacgggttgtgtagatgtgtctttcgccaaaggcatttaatccggcgacgtaacgtttatcttcgacaggggcaaaaggttcaccaaccaacggtacgcgcagttgcccgccgtgagtatggccgcacagcatcagatcccagggttcatcacgcatgacttctttgctgtcgggattatgcgccagcaccagtcttggcagattggcttcgctggcgggaggcggtttgcattgtccggcccataagtcaccagtgcctaccagttcgaattgcctgttcggcgtggcgatcaccgtagcctggttaaacaacaccgtgatgcccgcacttttcaacgtctcgccaattaagtgatttttttctgtaccaacagggcgatcgtggttgccgaagcaggcaaacgtcggcgcacattcggcaaggggggagagtacgtcactaaacgcgctaaaattcaggctcatatcaaataatacgtaatcgccgcccagtaatatcaaatcgggcttttgttctatgccaagagcaatcgcgtcagaaatcaggcttaaaggaacaaaacgagagtaatggagatcggccagaaaaagaattttgaatggtgctgcgttgtctttaaaaaaggcgaggcggtgacggattaattcaaaccagcctggctcacagtaatgcatataaccgaaaccactgctcgtggctatcgtcgcggcagtagcctgcaaaaatcggcggcgactaatcatcgctcatccctgcaaaaaaatcgggcagcgtcgtgctgcccgtgtgcatacttttagtcgatggtacgcagcagttcgttaatgccgactttgccgcgagttttcgcgtcaactttcttaacgataaccgcacagtagaggctgtatttgccatctttactcggcagattaccactaacaaccacagaccccgccggaacgcgaccgtagtggatttcgccggtttcacggtcgtaaatacgggtgctctgaccaatgtatacgcccatggaaatgacggaaccttcttcgacaatcaccccttcaaccacttcagagcgcgcgccgatgaagcaattatcttcaatgatggttgggttagcctgcagcggttccagcacgccgccgatgcccacgccaccggaaaggtggacgtttttaccaatctgcgcacaagaaccgacggtcgcccaggtatcaaccatggtgccttcatcaacatatgcgccgatgttgacgtaagacggcatcagcacggtgttacgggcaataaacgcaccctgacgtaccgccgctggtggcacaacgcggaagccttctttctggaaacgtgcttcgtcgtagtcggcgaatttcatcggcactttgtcgaagtagcggctttctgccccttcgatcacctgattatcattaatacggaaagagagcagcaccgcttttttcaaccactgatgcgtcacccactgaccgtcaattttttccgctacacgcagtgcgccggaatccagcagggcgatcacctgatttaccgcttcgcgggtaacggtgtctgcattggctggcgtgatctcggcacggcgttcaaaagcggtttcaataatgttctgtaactgctgcattgttaaactcttttcatatcagtaaacacatcaccctttatcgtttggattgagggcctctgtcaaccgctgatgcacttcctgctgcaactcgttattaagcgcacgccggtcagcggtggcaattatgaataaatcttctactcgctcgccaatggttgtaattcgggcaccatgaaggctaattcccagatcggcaaaaattttcccgactcgcgccagcagtccaggttggtcgagggcgatcagttcgaggaagcttttgcggtcggtatgggtcggcaaaaacgttacttcggtttcaacagtaaaatggcgtaatttggcgggttggcgacggggctgcggtggctgccagctactttgcgtcagtacttgctccagaccaaaccgaataacctcatgacgatctgcggacagcgggttgccatcgggttccagcacgataaaggtatccatcgccataccgtcgcgagtggtgaaaatttgtgcgtcgtgaacacttaaattgcggcggtctaattcggcacagacggcggcaaacagataagggcggtccgggctccagataaaaatctcggtgcctccacgcgtagcctgcgggctaagcaataccagcggtttgcttaaatcatgctgtaataaatggcgggcatgccaggccagttgatttgggctatggcggacaaaatagttagcacgacagcgactccaaatttggtgcagcgcctcttcgtcgatgttatccatgcgcagtagtgccagtgcctggagttggtgatggcgaacccgttcgcgcatatccggcgtgttttgcattccgcgtcgtagctgcttttcggtggcaaagtagagctcacgcaacagactttgcttccagctattccacagcgtttcgttggtggcgcaaatgtcagccacagtcaggcataccagatagcgcagacgattttccgtttgcacttcttcggcaaactgcttgatgacttccgggtcctgaatatcgcggcgttgggcggtcacgctcatcaacaggtgctggcgaaccagccaggcgaccagctgtgtttcgcgactgttcagcccgtggagttcggcaaaatgcactacatcctgagcaccgagaatggagtggtcgccgccgcgtcctttggcgatatcgtgaaacagcgcggcgatgaaaatcagctcagtactcggcaggcgcggccagacgtccacacacaacggatggcgctggcgcgtttcttcactggcaaaactctccagtttcagcatcacgcggatagtatgttcatccaccgtgtaggcgtggaacagatcaaactgcatctgcccgacgatatggctccattgcggcatatacgcgccgagcacgctatggcgatgcattggcaatagcccgcgccgcaccgctccggggtgacgcagaatgctcaaaaacagttttcgtgcttccggaatattacacagcggttgttgcagatggcgacgggcatggcgtaactggcgcagcgtggtggagtaaatgccggtgatcgcactgttgtgcaccatggtgtagaacatacgcaagatggcttccggctggcgcataaatagtgtttcatcacgcaggtcgattagcgtaccgcgtagctgaaactcatcgtcgattggacgtggtttttcgtcggcgggaagggcgaggatggcttcatcgaacagttgcagcagcatctggttgagttcactgacgcggcgtgtaacgcggaagtaatccttcatcatccgctcgaccggttcgttaccttcaccactgtaattcagacgctgggcgacgctaagctggcgatcgaataacaggcgattatcgtaacggctgacgaccagatgcagggcaaagcgaatacgccacaatatatgcagacattcgtttaattccgcccgctccgcactggttaagaagccaaacccgaccatttcatccaggcttgttgcgccaaaatgacggcgggccacccattgcagagtgtggatatcgcgcaagccgccagggctgcttttgatgtctggttcaaggttgtagctggtgccatggtaacgctgatggcgctggttctgttcttcaactttcgccgcgtagaacttgtcggaaggccagaatccttcgctgaaaatatgtttttgcagttcgaggaacagcgcaacatcgccaattaataagcgggattcgattaaattggtggcgacggttaaatcgcttaacccttccagcatgcactcttcaagcgtgcgcacgctatgaccgacttccagctttacatcccagagcagcgttaacagctcgcccactttttgcgcctgatcgtccgggagctttttacggcttaaaatcagtaaatcgacgtcactaagtggatgcagctcgccacgaccgtagccaccgacggcgaccaatgccaggtcggcaatctggctgaatcccgcttcaatccataatcgttgcaggagctggtcgataaactcggtgcgcgcctcaatcaactgttctgcagagatcccattgtcaaaggcatcacccagccaacgctggaaagtatcgatatgggcttttatcccaccgacggttaattcatcacggggccagacgcatggattttgcggttgaccgggcagggtggggagagcggtgtttgcgtactgttctggaagggtattcattgtgcgccacccataagattaaattatcgcattaaaaaagccggcattcgccggcttcatcttattcgtcgtggctgattatcgccgggatggtgtcatccttgcgtagcgtcagaatttcgcagccgttatcagtcaccacaatagtatgctcatattgtgcagacaagctgcgatctttggtttttaccgtccagccatctttcatggtgcggatctcttttttacccgcgttgaccattggctcgatggtgaacgtcatcccaggtttcagtacgacgttggtttcacgggagtcatagtgcagcacctgcggttcttcatggaagccgcgaccaataccgtgtccgcaatattcacgaacgacggagaagccttctgcttcgacaaatttctgaatcgccgcaccgatttcgcgcagattaatgcctggttttaccatgcgtagcgccaggtacaggctttcttgcgtgatgcggcacagacgttcgcccatgatggtcggcttaccgacgataaacattttgctggtatcgccgtggaaaccatctttgattacggtgacatcaatgttaacgatatcgccatctttcagcagcttagcatcgtccgggataccgtggcacaccacttcattaatagagatgcaaacggatttcggatagccgtgatagccgaggcaggcagaaaccgcgtgttgttcattaacaatgtaatcattacagatgcgatccagctcgccggtgctgacgcccggtttaacatacggttcgatcatctccagcacttcggcagccagtcggccagcgacgcgcattttttcgatatcttctggggtcttgatagagatagccattaattctgtccatcagcgtcggtgataccgacaatatatatgtaagtgccgtcaatggtatcacacccgggcaaattgagaatcattctgaatttcgccaaacgtgccactgaaggttttctataatagaaaattcgacgtctgatgctgtacacagcgccaacaattattggtgtccacgacgtatttgtggtataaagcgcgccggacttccgatccatttcgtatacacagactggacggaagcgacaatctcactttgtgtaacaacacacacgtatcggcacatattccggggtgccctttggggtcggtaatatgggatacgtggaggcataaccccaacttttatatagaggttttaatcatggcaactgtttccatgcgcgacatgctcaaggctggtgttcacttcggtcaccagacccgttactggaacccgaaaatgaagccgttcatcttcggtgcgcgtaacaaagttcacatcatcaaccttgagaaaactgtaccgatgttcaacgaagctctggctgaactgaacaagattgcttctcgcaaaggtaaaatccttttcgttggtactaaacgcgctgcaagcgaagcggtgaaagacgctgctctgagctgcgaccagttcttcgtgaaccatcgctggctgggcggtatgctgactaactggaaaaccgttcgtcagtccatcaaacgtctgaaagacctggaaactcagtctcaggacggtactttcgacaagctgaccaagaaagaagcgctgatgcgcactcgtgagctggagaaactggaaaacagcctgggcggtatcaaagacatgggcggtctgccggacgctctgtttgtaatcgatgctgaccacgaacacattgctatcaaagaagcaaacaacctgggtattccggtatttgctatcgttgataccaactctgatccggacggtgttgacttcgttatcccgggtaacgacgacgcaatccgtgctgtgaccctgtacctgggcgctgttgctgcaaccgtacgtgaaggccgttctcaggatctggcttcccaggcggaagaaagcttcgtagaagctgagtaataaggcttgataactcccccaaaatagttcgagttgcagaaaggcggcaagctcgagaattcccgggagcttacatcagtaagtgaccgggatgagcgagcgaagataacgcatctgcggcgcgaaatatgaagggggagagcccttatagaccaggtagtacacgtttggttagggggcctgcatatggccccctttttcacttttatatctgtgcggtttaatgccgggcagatcacatctccgaggattttagaatggctgaaattaccgcatccctggtaaaagagctgcgtgagcgtactggcgcaggcatgatggattgcaaaaaagcactgactgaagctaacggcgacatcgagctggcaatcgaaaacatgcgtaagtccggtgctattaaagcagcgaaaaaagcaggcaacgttgctgctgacggcgtgatcaaaaccaaaatcgacggcaactacggcatcattctggaagttaactgccagactgacttcgttgcaaaagacgctggtttccaggcgttcgcagacaaagttctggacgcagctgttgctggcaaaatcactgacgttgaagttctgaaagcacagttcgaagaagaacgtgttgcgctggtagcgaaaattggtgaaaacatcaacattcgccgcgttgctgcgctggaaggcgacgttctgggttcttatcagcacggtgcgcgtatcggcgttctggttgctgctaaaggcgctgacgaagagctggttaaacacatcgctatgcacgttgctgcaagcaagccagaattcatcaaaccggaagacgtatccgctgaagtggtagaaaaagaataccaggtacagctggatatcgcgatgcagtctggtaagccgaaagaaatcgcagagaaaatggttgaaggccgcatgaagaaattcaccggcgaagtttctctgaccggtcagccgttcgttatggaaccaagcaaaactgttggtcagctgctgaaagagcataacgctgaagtgactggcttcatccgcttcgaagtgggtgaaggcatcgagaaagttgagactgactttgcagcagaagttgctgcgatgtccaagcagtcttaattatcaaaaaggagccgcctgagggcggcttctttttgtgcccatcttgtaaattcagctaacccttgtggggctgcgctgaaaagcgacgtacaatgtcgctagtattaattcatttcaatcgttgacagtctcaggaaagaaacatggctaccaatgcaaaacccgtctataaacgcattctgcttaagttgagtggcgaagctctgcagggcactgaaggcttcggtattgatgcaagcatactggatcgtatggctcaggaaatcaaagaactggttgaactgggtattcaggttggtgtggtgattggtgggggtaacctgttccgtggcgctggtctggcgaaagcgggtatgaaccgcgttgtgggcgaccacatggggatgctggcgaccgtaatgaacggcctggcaatgcgtgatgcactgcaccgcgcctatgtgaacgctcgtctgatgtccgctattccattgaatggcgtgtgcgacagctacagctgggcagaagctatcagcctgttgcgcaacaaccgtgtggtgatcctctccgccggtacaggtaacccgttctttaccaccgacagtgcagcttgcctgcgtggtatcgaaattgaagccgatgtggtgctgaaagcaaccaaagttgacggcgtgtttaccgctgatccggcgaaagatccaaccgcaaccatgtacgagcaactgacttacagcgaagtgctggaaaaagagctgaaagtcatggacctggcggccttcacgctggctcgtgaccataaattaccgattcgtgttttcaatatgaacaaaccgggtgcgctgcgccgtgtggtaatgggtgaaaaagaagggactttaatcacggaataattcccgtgatggataaataagggtaagattccgcgtaagtatcgcgggggcgtaagtctggttataaggcgttattgttgcaggcagtttggtcacggccagcgcgcagcaaccggagcgtacaaaagtacgtgaggatggcgagcactgcccggggccaaaatggcaaataaaatagcctaataatccagacgattacccgtaatatgtttaatcagggctatacttagcacacttccactgtgtgtgactgtctggtctgactgagacaagttttcaaggattcgtaacgtgattagcgatatcagaaaagatgctgaagtacgcatggacaaatgcgtagaagcgttcaaaacccaaatcagcaaaatacgcacgggtcgtgcttctcccagcctgctggatggcattgtcgtggaatattacggcacgccgacgccgctgcgtcagctggcaagcgtaacggtagaagattcccgtacactgaaaatcaacgtgtttgatcgtagtatgtctccggccgttgaaaaagcgattatgacgtccgatcttggcctgaacccgaactctgcgggtagcgacatccgtgttccgctgccgccgctgacggaagaacgtcgtaaagatctgaccaaaatcgttcgtggtgaagcagaacaagcgcgtgttgcagtacgtaacgtgcgtcgtgacgcgaacgacaaagtgaaagcactgttgaaagataaagagatcagcgaagacgacgatcgccgttctcaggacgatgtacagaaactgactgatgctgcaatcaagaaaattgaagcggcgctggcagacaaagaagcagaactgatgcagttctgatttcttgaacgacaaaaacgccgctcagtagatccttgcggatcggctggcggcgttttgctttttattctgtctcaactctggatgtttcatgaagcaactcaccattctgggcagcaccggcagcattggttgcagcacgctggacgtggtgcgccataatcccgaacacttccgcgtagttgcgctggtggcaggcaaaaatgtcactcgcatggtagaacagtgcctggaattctctccccgctatgccgtaatggacgatgaagcgagtgcgaaacttcttaaaacgatgctacagcaacagggtagccgcaccgaagtcttaagtgggcaacaagccgcttgcgatatggcagcgcttgaggatgttgatcaggtgatggcagccattgttggcgctgctgggctgttacctacgcttgctgcgatccgcgcgggtaaaaccattttgctggccaataaagaaagtctggttacctgcggacgtctgtttatggacgccgtaaagcagagcaaagcgcaattgttaccggtcgatagcgaacataacgccatttttcagagtttaccgcaacctatccagcataatctgggatacgctgaccttgagcaaaatggcgtggtgtccattttacttaccgggtctggtggccctttccgtgagacgccattgcgcgatttggcaacaatgacgccggatcaagcctgccgtcatccgaactggagcatggggcgtaaaatttctgtcgatagcgctaccatgatgaacaaaggtctggaatacattgaagcgcgttggctgtttaacgccagcgccagccagatggaagtgctgattcacccgcagagtgtgattcacagtatggtgcgctatcaggacggcagtgttctggcgcagctgggggaaccggatatgcgtacgccaattgcccacaccatggcatggccgaatcgcgtgaactctggcgtgaagccgctcgatttttgcaaactaagtgcgttgacatttgccgcaccggattatgatcgttatccatgcctgaaactggcgatggaggcgttcgaacaaggccaggcagcgacgacagcattgaatgccgcaaacgaaatcaccgttgctgcttttcttgcgcaacaaatccgctttacggatatcgctgcgttgaatttatccgtactggaaaaaatggatatgcgcgaaccacaatgtgtggacgatgtgttatctgttgatgcgaacgcgcgtgaagtcgccagaaaagaggtgatgcgtctcgcaagctgaggataatccggctacagagagtcgcgctatttgttagcgtagggcttcagtgatatagtctgcgccatctgatcgtaagtagttggctttataaggtcagatatgccgtggttttacacggcttttttttgtataggcttcagtattcctgagtaccgtaaaccctgtcagggaataaaaaacgcgtgatgttgtctgctactcaaccacttagcgaaaaattgccagcgcatggctgccgtcatgttgcgatcattatggacggcaatggccgctgggcaaaaaagcaagggaagattcgtgcctttgggcataaagccggggcaaaatccgtccgccgggctgtctcttttgcggccaacaacggtattgaggcgttaacgctgtatgcctttagtagtgaaaactggaaccgaccagcgcaggaagtcagtgcgttaatggaactgtttgtgtgggcgctcgatagcgaagtaaaaagtctgcaccgacataacgtgcgtctgcgtattattggcgataccagtcgctttaacagccgtttgcaagaacgtattcgtaaatctgaagcgctaacagccgggaataccggtctgacgctgaatattgcggcgaactacggtggacgttgggatatagtccagggagtcaggcaactggctgaaaaggtgcagcaaggaaacctgcaaccagatcagatagatgaagagatgctaaaccagcatgtctgtatgcatgaactggcccctgtagatttagtaattaggactgggggggagcatcgcattagtaactttttgctttggcaaattgcctatgccgaactttactttacagatgttctctggcccgatttcgatgaacaagactttgaaggggcgttaaatgcctttgctaatcgagagcgtcgtttcggcggcaccgagcccggtgatgaaacagcctgatgggggtcgcttttgctgaagtatcgcctgatatctgcttttgtgttaatacccgtcgtcatcgcggcgttgtttctgttgccgccggtggggttcgccattgtaacgctggtggtctgcatgctggcagcgtgggaatggggacagcttagcggttttaccactcgtagccagcgagtatggttggcggtgttatgcgggttattgttggcgctgatgctttttctgttgccggaatatcaccgaaatattcatcaaccgctggttgaaatcagtctttgggctagcctgggttggtggattgtcgcgctattgctggtgctgttttacccaggttccgcagcaatctggcgtaactctaaaacattgcgccttatttttggcgtgctaaccattgttcccttcttctggggcatgctggcgttacgggcctggcactatgacgagaatcattacagtggcgcaatatggttgctctatgtcatgatcctggtatggggcgctgactccggcgcatatatgtttggcaaattgtttggtaaacataagctggcaccgaaggtttctccgggtaaaacctggcaaggctttatcggtggactcgctactgcagcggtaatcagttggggttatggcatgtgggcgaatctcgacgtcgctcccgtcaccttactcatttgctctattgtcgcagcgttagccagtgtgctcggcgatctgaccgagagtatgtttaagcgtgaagcaggaattaaggacagcggtcatttaattccaggacacggtggtattttagatcgtattgatagcctgacggctgcggtaccggtctttgcttgcttgttgttactggtattcaggacgctttaacggaaggtaatatgctgagttttctctgggatttggctagcttcatcgttgcactgggtgtacttatcaccgtgcatgaatttggtcatttctgggttgcccggcgttgtggtgttcgcgttgagcgtttcagtatagggtttggtaaggcgctctggcggcgaactgataagctcggcaccgaatatgttatcgccctgatcccgttgggcggttatgtcaaaatgctggatgagcgcgcagaaccggtcgttccggaactccgccaccatgccttcaataataaatctgtcggccaacgagcggcgattattgccgcaggtccggttgcaaacttcatttttgctatctttgcctactggctggtttttattattggtgtgcctggcgtacgtccggtggttggcgaaatagcagccaatagcatagctgcggaagcacaaattgcaccaggtacggaactaaaagccgtagatggtatcgaaacgcctgattgggatgccgtgcgtttgcagttggtcgataaaattggcgatgaaagcaccaccattacagtagcgccatttggcagcgaccaacggcgggatgtaaagctcgatttacgtcactgggcgtttgagcctgataaagaagatccggtatctagcctggggattcgtcctcgtgggccgcaaattgaacctgtactggaaaatgtgcagccaaacagcgcggcaagcaaggcaggtttgcaagcaggcgacaggatcgttaaagtcgatggtcagcccttaacgcagtgggtgacctttgtgatgcttgtccgggataacccgggtaaatccttagcgttagaaatcgaaaggcaggggagtcccttgtctttgacattaatcccggagagtaaaccgggtaatggtaaagcgattggttttgtcggtattgagccgaaagtcattcctttgccagatgagtataaagttgtacgccagtatgggccgttcaacgccatcgtcgaagccacggacaaaacgtggcagctgatgaagctgacggtcagtatgctgggaaaattgatcaccggtgatgtgaaactgaacaacctcagtgggccgatctctatcgccaagggggctgggatgacagcggaactcggggttgtttattacctgccgtttcttgcgcttattagcgtgaacttagggataattaacctgtttccgttgcccgtacttgacggggggcatctgctgttccttgcgatcgaaaagatcaagggcggaccggtatccgagcgggttcaagacttttgttatcgcattggcagcattctgctggtgctgttaatggggcttgcacttttcaatgatttctctcggttatgagagttagttaggaagaacgcataataacgatggcgatgaaaaagttgctcatagcgagcctgctgtttagcagcgccaccgtatacggtgctgaagggttcgtagtgaaagatattcatttcgaaggccttcagcgtgtcgccgttggtgcggccctcctcagtatgccggtgcgcacaggcgacacggttaatgatgaagatatcagtaataccattcgcgctctgtttgctaccggcaactttgaggatgttcgcgtccttcgtgatggtgatacccttctggttcaggtaaaagaacgtccgaccattgccagcattactttctccggtaacaaaagcgtgaaagatgacatgctgaagcaaaacctcgaggcttctggtgtgcgtgtgggcgaatccctcgatcgcaccaccattgccgatatcgagaaaggtctggaagacttctactacagcgtcggtaaatatagcgccagcgtaaaagctgtcgtgaccccgctgccgcgcaaccgtgttgacctaaaactggtgttccaggaaggtgtgagtgctgaaatccagcaaattaacattgttggtaaccatgctttcaccaccgacgaactgatctctcatttccaactgcgtgacgaagtgccgtggtggaacgtggtaggcgatcgtaaataccagaaacagaaactggcgggcgaccttgaaaccctgcgcagctactatctggatcgcggttatgcccgtttcaacatcgactctacccaggtcagtctgacgccagataaaaaaggtatttacgtcacggtgaacatcaccgaaggcgatcagtacaagctttctggcgttgaagtgagcggcaaccttgccgggcactccgctgaaattgagcagctgactaagatcgagccgggtgagctgtataacggcaccaaagtgaccaagatggaagatgacatcaaaaagcttctcggtcgctatggttatgcctatccgcgcgtacagagcatgcccgaaattaacgatgccgacaaaaccgttaaattacgtgtgaacgttgatgcgggtaaccgtttctacgtgcgtaagatccgttttgaaggtaacgataccagcaaagatgccgtcctgcgtcgcgaaatgcgtcagatggaaggtgcatggctggggagcgatctggtcgatcagggtaaggagcgtctgaatcgtctgggcttctttgaaactgtcgataccgatacccaacgtgttccgggtagcccggaccaggttgatgtcgtctacaaggtaaaagagcgcaacaccggtagcttcaactttggtattggttacggtactgaaagtggcgtgagcttccaggctggtgtgcagcaggataactggttaggtacaggttatgctgttggtatcaacgggaccaaaaacgattaccagacctatgctgaactgagcgtaaccaacccgtacttcaccgtagatggcgtaagcctcggtggtcgtctcttctataatgacttccaggcagatgacgccgacctgtccgactataccaacaagagttatggtacagacgtgacgttgggcttcccgattaacgaatataacagcctgcgtgcaggtctgggttatgtacataactccctgtccaacatgcagcctcaggttgcgatgtggcgttatctgtactctatgggtgaacatccgagcacctctgatcaggataacagcttcaaaacggacgacttcacgttcaactatggttggacctataacaagcttgaccgtggttacttcccgacagatggtagtcgtgtcaacctgaccggtaaagtgaccattcctggaagcgataacgaatactacaaagtgacgttagacacggcgacttatgtgccgatcgatgacgatcacaaatgggttgttctggggcgtacccgctggggttatggtgatggtttaggcggcaaagagatgccgttctacgagaacttctatgccggtggttccagcaccgtgcgtggcttccagtccaataccattggtccgaaagcagtttacttcccgcatcaggccagtaattatgatccggactatgattacgaatgtgcgactcaggacggcgcgaaagacctgtgtaaaagcgatgatgctgtaggcggtaacgccatggcggttgccagcctcgagttcatcaccccgacgccgtttattagcgataagtatgctaacagcgttcgtacttccttcttctgggatatgggtaccgtttgggatacaaactgggattccagccaatattctggatatccggactatagtgatccaagcaatatccgtatgtctgcgggtatcgcattacaatggatgtccccattggggccgttggtgttctcctacgcccagccgttcaaaaagtacgatggagacaaggcagaacagttccagtttaacatcggtaaaacctggtaagtgttctccacaaaggaatgtagtggtagtgtagcgatgactttaggcgatcaatataagatcgccgggccacgcaaagaactgcaccctccggtgcaaatgggatggtaaggagtttattgtgaaaaagtggttattagctgcaggtctcggtttagcactggcaacttctgctcaggcggctgacaaaattgcaatcgtcaacatgggcagcctgttccagcaggtagcgcagaaaaccggtgtttctaacacgctggaaaatgagttcaaaggccgtgccagcgaactgcagcgtatggaaaccgatctgcaggctaaaatgaaaaagctgcagtccatgaaagcgggcagcgatcgcactaagctggaaaaagacgtgatggctcagcgccagacttttgctcagaaagcgcaggcttttgagcaggatcgcgcacgtcgttccaacgaagaacgcggcaaactggttactcgtatccagactgctgtgaaatccgttgccaacagccaggatatcgatctggttgttgatgcaaacgccgttgcttacaacagcagcgatgtaaaagacatcactgccgacgtactgaaacaggttaaataagtaatgcctagtattcgactggctgatttagcgcagcagttggatgcagaactacacggtgatggcgatatcgtcatcaccggcgttgcgtccatgcaatctgcacaaacaggtcacattacgttcatggttaacccaaaataccgtgagcatttaggcttgtgccaggcgtccgcggttgtcatgacccaggacgatcttcctttcgcgaaaagtgccgcactggtagtgaagaatccctacctgacttacgcgcgcatggcgcaaattttagataccacgccgcagcccgcgcagaacattgcacccagtgcggtgatcgacgcgacggcgaagctgggtaacaacgtaagcattggcgctaacgcggtgattgagtccggcgttgaactgggcgataacgtgattatcggtgccggttgcttcgtaggtaaaaacagcaaaatcggtgcaggtagccgtctctgggcgaacgtaaccatttaccatgagatccagatcggtcagaattgcctgatccagtccggaacagtggtaggcgcagacggctttggttatgccaacgatcgtggtaactgggtgaagatcccacagattggtcgcgtaattattggcgatcgcgtggagatcggtgcctgcacaaccatcgatcgcggcgcgctggatgacactattattggcaatggcgtgatcattgataaccagtgccagattgcacataacgtcgtgattggcgacaatacggcggttgccggtggcgtcattatggcgggcagcctgaaaattggtcgttactgcatgatcggcggagccagcgtaatcaacgggcatatggaaatatgcgacaaagtgacggttacgggcatgggtatggtgatgcgtcccatcactgaaccaggcgtctattccagtggcattccgctgcaacccaacaaagtctggcgcaaaaccgctgcactggtgatgaacattgatgacatgagcaagcgtctgaaaagccttgagcgcaaggttaatcaacaagactaacgttccatcttttgttcgccaaactttacggcctgtctcattcttacgattgcggcaggccgtgttattattgtcgtttcttatattttgacaggaagagtatcttgactactaacactcatactctgcagattgaagagattttagaacttctgccgcaccgtttcccgttcttactggtggatcgcgtgctggattttgaagaaggtcgttttctgcgcgcagtaaaaaatgtctctgtcaatgagccattcttccagggccatttccctggaaagccgattttcccgggtgtgctgattctggaagcaatggcacaggcaacaggtattctggcgtttaaaagcgtaggaaaactggaaccgggtgagctgtactacttcgctggtattgacgaagcgcgcttcaagcgcccggtcgtgcctggcgatcaaatgatcatggaagtcactttcgaaaaaacgcgccgcggcctgacccgttttaaaggggttgctctggtcgatggtaaagtagtttgcgaagcaacgatgatgtgtgctcgtagccgggaggcctgatacgtgattgataaatccgcctttgtgcatccaaccgccattgtggaagagggcgcgagtattggcgcgaacgcacacattggtcctttttgtatcgttggaccccatgtcgaaattggtgagggtaccgtactgaaatctcacgttgtcgtgaatggtcatactaaaattggccgcgataatgagatttatcagttcgcctccatcggcgaagttaaccaggatctgaaatatgctggcgaaccgacccgtgtggaaatcggcgatcgtaaccgcattcgcgaaagcgtcaccattcatcgtggcacagtccagggcggtggattgacgaaggtgggcagcgacaacttactgatgatcaacgcgcacattgcgcacgattgtacggtaggtaaccgctgtattctcgccaacaacgcaacgctggcgggtcacgtaagcgttgacgacttcgcgatcatcggcggcatgaccgcagtccatcagttctgcatcattggtgcgcacgtgatggttggcggctgctccggtgtggcgcaggacgtccctccttatgtcattgcgcagggtaaccacgcaacgccgttcggtgtcaatatcgaagggctgaagcgccgcggattcagccgtgaggcgattaccgctatccgcaatgcgtataagctgatttatcgtagcggtaaaacgctcgatgaagtgaaaccggaaattgctgaactggcggaaacatatccggaagtgaaagcctttaccgatttctttgcacgcagtacgcgcggtctgattcgttaatgactgaacagcgtccattaacgattgccctggtcgccggagaaacctccggcgatatcctgggggccggtttaatccgcgctctgaaagaacatgtgcccaacgcccgctttgttggtgttgccgggccacgaatgcaggctgaaggctgcgaagcctggtacgaaatggaagaactggcggtgatgggcattgttgaagtgctcggtcgtctgcgtcgcttactgcatattcgtgccgatctgacaaagcgttttggcgaactgaagccagatgtttttgttggtattgatgcgcctgacttcaatattactcttgaaggtaacctcaaaaagcagggtatcaaaaccattcattacgtcagtccgagtgtctgggcgtggcgacagaaacgtgttttcaaaataggcagagccaccgatctggtgctcgcatttctgcctttcgaaaaagcgttttatgacaaatacaacgtaccgtgccgctttatcggtcataccatggctgatgccatgccattagatccagataaaaatgccgcccgtgatgtgctggggatccctcacgatgcccactgcctggcgttgctaccggggagccgtggtgcagaagttgaaatgcttagtgccgatttcctgaaaacggcccagcttttgcgccagacatatccggatctcgaaatcgtggtgccactggtgaatgccaaacgccgcgagcagtttgaacgcatcaaagctgaagtcgcgccagaccttagtgttcatttgctggatgggatgggccgtgaggcgatggtcgccagcgatgcggcgctactggcgagcggtacggcagccctggagtgtatgctggcgaaatgcccgatggtggtgggatatcgcatgaagccttttaccttctggttggcgaagcggctggtgaaaactgattatgtcagcctgccaaatctgctggcgggcagagagttagtcaaagaattattgcaggaagagtgtgagccgcaaaaactggctgcggcgctgttaccgctgttggcgaacgggaaaaccagccacgcgatgcacgataccttccgtgaactgcatcagcagatccgctgcaatgccgatgagcaggcggcacaagccgttctggagttagcacaatgatcgaatttgtttatccgcacacgcagctggttgcgggtgtggatgaagtcggacgcgggccgttagttggcgcggtcgtcaccgctgcggtgatccttgacccggcgcgcccgattgccgggctgaatgattccaaaaagctgagcgaaaaacgccgtctggcgctctatgaagagatcaaagagaaagcgttgagctggagtctgggccgcgcggaaccccacgaaatcgacgagctgaacattcttcatgcgaccatgctggcgatgcagcgtgccgtcgctgggctgcatattgcgccggaatatgtgttgattgatggtaaccgctgcccgaaattaccgatgcctgcgatggctgtggtgaaaggcgatagccgcgtaccggaaatcagtgccgcgtctatcctggcgaaagtgacgcgtgacgccgaaatggcggcgctggatattgttttcccgcaatatggttttgcccaacacaaagggtacccaaccgcttttcatctggaaaaactggctgaacacggcgcgaccgaacaccatcggcgcagctttgggcctgtcaaacgcgcactgggacttgcgtcctgattcttgtgtcgagattaagtaaaccggaatctgaagatgtctgaaccacgtttcgtacacctgcgggtgcacagcgactacagcatgatcgatggcctggccaaaaccgcaccgttggtaaaaaaggcggcggcgttgggtatgccagcactggcgatcaccgatttcaccaacctttgtggtctggtgaagttctacggagcgggacatggcgcagggattaagcctatcgtcggggcagattttaacgtccagtgcgacctgctgggtgatgagttaacccacctgacggtactggcggcgaacaataccggctatcagaatctgacgttgctgatcagtaaagcgtatcagcgcgggtacggtgccgccgggccgatcatcgatcgcgactggcttatcgaattaaacgaagggttgatccttctttccggcggacgcatgggcgacgtcggacgcagtcttttgcgtggtaacagcgcgctggtagatgagtgtgtcgcgttttatgaagaacacttcccggatcgctattttctcgagctgatccgcaccggcaggccggatgaagaaagctatctgcacgcggcggtggaactggcggaagcgcgcggtttgcccgtcgtggcgaccaacgacgtgcgctttatcgacagcagcgactttgacgcacacgaaatccgcgtcgcgatccacgacggctttaccctcgacgatcctaaacgcccgcgtaactatagcccgcagcaatatatgcgtagcgaagaggagatgtgtgagctgtttgccgacatccccgaagcccttgccaacaccgttgagatcgccaaacgctgtaacgtaaccgtgcgtcttggtgaatacttcctgccgcagttcccgaccggggacatgagcaccgaagattatctggtcaagcgtgcaaaagagggcctggaagagcgtctggcctttttattccctgatgaggaagaacgtcttaagcgccgcccggaatatgacgaacgtctggagactgaacttcaggttatcaaccagatgggcttcccgggctacttcctcatcgttatggaatttatccagtggagcaaagataacggcgtaccggtagggccaggccgtggctccggtgcgggtagtctggtggcctacgcgctgaaaatcaccgacctcgatccgctggaatttgacctgctgttcgaacgtttccttaacccggaacgtgtctccatgcctgacttcgacgttgacttctgtatggagaaacgcgatcaggttatcgagcacgtagcggacatgtacggtcgtgatgcggtaagccagatcatcaccttcggtacaatggcggcgaaagcggtgatccgcgacgtaggccgcgtgctggggcatccgtacggctttgtcgatcgtatcagcaaactgatcccgcccgatccggggatgacgctggcgaaagcgtttgaagccgagccgcagctgccggaaatctacgaagcggatgaagaagttaaggcgctgatcgacatggcgcgcaaactggaaggggtcacccgtaacgccggtaagcacgccggtggggtggttatcgcgccgaccaaaattaccgattttgcgccgctttactgcgatgaagagggcaaacatccggtcacccagtttgataaaagcgacgttgaatacgccggactggtgaagttcgacttccttggtttgcgtacgctcaccatcatcaactgggcgctggagatgatcaacaagcggcgggcgaagaatggcgagccgccgctggatatcgctgcgatcccgctggatgataagaaaagcttcgacatgctgcaacgcagcgaaaccacggcggtattccagcttgaaagccgcggcatgaaggacctgatcaagcgtctacaacctgactgcttcgaagatatgatcgccctagtggcactgttccgccccggtccgttgcaaagtgggatggtggataactttatcgaccgtaaacatggtcgtgaagagatctcctatccggacgtacagtggcagcatgaaagcctgaaaccggtactggagccaacctacggcattatcctgtatcaggaacaggtcatgcagattgcgcaggtgctttctggttataccctcggtggcgcggatatgctgcgtcgtgcgatgggtaagaaaaagccggaagagatggctaagcaacgttctgtatttgctgaaggtgcagaaaagaacggaatcaacgctgaactggcgatgaaaatcttcgacctggtggagaaattcgctggttacggatttaacaaaagccactctgcggcctatgctttggtgagttatcaagcgttatggctgaaagcgcactatcctgcggagtttatggcggcggtaatgaccgccgatatggacaacaccgagaaggtggtgggtctggtggatgagtgctggcggatggggctgaaaatcctgccaccagatataaactccggtctttaccatttccacgtcaacgacgacggcgaaatcgtgtatggtattggcgcgatcaaaggggtcggtgaaggtccgattgaggccatcatcgaagcccgtaataaaggcggctacttccgcgaactgtttgatctctgcgcccgtaccgacaccaaaaagttgaaccgtcgcgtgctggaaaaactgatcatgtccggggcgtttgaccgtcttgggccacatcgcgcagcgctgatgaacagcctgggcgatgcgttaaaagcggcagatcaacacgcgaaagcggaagctatcggtcaggccgatatgttcggcgtgctggccgaagagccggaacaaattgaacaatcctacgccagctgccaaccgtggccggagcaggtggtattagatggggaacgtgaaacgttaggcctgtacctgaccggacaccctatcaaccagtatttaaaagagattgagcgttatgtcggaggcgtaaggctgaaagacatgcacccgacagaacgtggtaaagtcatcacggctgcggggctcgttgttgccgcgcgggttatggtcaccaagcgcggcaatcgtatcggtatctgcacgctggatgaccgttccgggcggctggaagtgatgttgtttactgacgccctggataaataccagcaattgctggaaaaagaccgcatacttatcgtcagcggacaggtcagctttgatgacttcagcggtgggcttaaaatgaccgctcgcgaagtgatggatattgacgaagcccgggaaaaatatgctcgcgggcttgctatcagcctgacggacaggcaaattgatgaccagcttttaaaccgactccgtcagtctctggaaccccaccgctctgggacaattccagtacatctctactatcagagggcggatgcacgcgcgcggttgcgttttggcgcgacgtggcgtgtctctccgagcgatcgtttattaaacgatctccgtggcctcattggtagcgagcaggtggaactggagtttgactaatacaggaatactatgagtctgaatttccttgattttgaacagccgattgcagagctggaagcgaaaatcgattctctgactgcggttagccgtcaggatgagaaactggatattaacatcgatgaagaagtgcatcgtctgcgtgaaaaaagcgtagaactgacacgtaaaatcttcgccgatctcggtgcatggcagattgcgcaactggcacgccatccacagcgtccttataccctggattacgttcgcctggcatttgatgaatttgacgaactggctggcgaccgcgcgtatgcagacgataaagctatcgtcggtggtatcgcccgtctcgatggtcgtccggtgatgatcattggtcatcaaaaaggtcgtgaaaccaaagaaaaaattcgccgtaactttggtatgccagcgccagaaggttaccgcaaagcactgcgtctgatgcaaatggctgaacgctttaagatgcctatcatcacctttatcgacaccccgggggcttatcctggcgtgggcgcagaagagcgtggtcagtctgaagccattgcacgcaacctgcgtgaaatgtctcgcctcggcgtaccggtagtttgtacggttatcggtgaaggtggttctggcggtgcgctggcgattggcgtgggcgataaagtgaatatgctgcaatacagcacctattccgttatcagcccggaaggttgtgcgtccattctgtggaagagcgccgacaaagcgccgctggcggctgaagcgatgggtatcattgctccgcgtctgaaagaactgaaactgatcgactccatcatcccggaaccactgggtggtgctcaccgtaacccggaagcgatggcggcaagcttgaaagcgcaactgctggcggatctggccgatctcgacgtgttaagcactgaagatttaaaaaatcgtcgttatcagcgcctgatgagctacggttacgcgtaattcgcaaaagttctgaaaaagggtcacttcggtggcccttttttatcgccacggtttgagcaggctatgattaaggaaggattttccaggaggaacacatgaacatcattgccattatgggaccgcatggcgtcttttataaagatgagcccatcaaagaactggagagcgcgctggtggcgcaaggctttcagattatctggccacaaaacagcgttgatttgctgaaatttatcgagcataaccctcgaatttgcggcgtgatttttgactgggatgagtacagtctcgatttatgtagcgatatcaatcagcttaatgaatatctcccgctttatgccttcatcaacacccacagcacgatggatgtcagcgtgcaggatatgcggatggcgctctggttttttgaatatgcgctggggcaggcggaagatatcgccattcgtatgcgtcagtacaccgacgaatatcttgataacattacaccgccgttcacgaaagccttgtttacctacgtcaaagagcggaagtacaccttttgtacgccggggcatatgggcggcaccgcatatcaaaaaagcccggttggctgtctgttttatgatttttcggcgggaatactcttaaggctgatgtctctattagcgtcaccgagcttggtagcttgctcgaccacaccgggccacacctggaagcggaagagtacatcgcgcggacttttggcgcggaacagagttatatcgttaccaacggaacaagcacgagcaacaaaattgtgggtatgtacgccgcgccatccggcagtacgctgttgatcgaccgcaattgtcataaaagcctggcgcatctgttgatgatgaacgatgtagtgccagtctggctgaaaccgacgcgtaatgcgttggggattcttggtgggatcccgcgccgtgaatttactcgcgacagcatcgaagagaaagtcgctgctaccacgcaagcacaatggccggttcatgcggtgatcaccaactccacctatgatggcttgctctacaacaccgactggatcaaacagacgctggatgtcccgagcattcacttcgattctgcctgggtgccgtacacccattttcatccgatctaccagggtaaaagtggtatgagcggcgagcgtgttgcgggaaaagtgatcttcgaaacgcaaagcacccacaaaatgctggcggcgttaagccaggctagcctgatccacattaaaggcgagtatgacgaagaggcctttaacgaagcctttatgatgcataccaccaccagccccagttatcccattgttgctagcgttgagacggcggcggcgatgctgcgtggtaatccgggcaaacggctgattaaccgtagtgtagaacgagctctgcattttcgcaaagaggtccagcggctgcgggaagagtctgacggttggtttttcgatatctggcaaccgccgcaggtggatgaagccgaatgctggcccgttgcgcctggcgaacagtggcacggctttaacgatgcggatgccgatcatatgtttctcgatccggttaaagtcactattttgacaccggggatggacgagcagggcaatatgagcgaggaggggatcccggcggcgctggtagcaaaattcctcgacgaacgtgggatcgtagtagagaaaaccggcccttataacctgctgtttctctttagtattggcatcgataaaaccaaagcaatgggattattgcgtgggttgacggaattcaaacgctcttacgatctcaacctgcggatcaaaaatatgctacccgatctctatgcagaagatcccgatttctaccgcaatatgcgtattcaggatctggcacaagggatccataagctgattcgtaaacacgatcttcccggtttgatgttgcgggcattcgatactttgccggagatgatcatgacgccacatcaggcatggcaacgacaaattaaaggcgaagtagaaaccattgcgctggaacaactggtcggtagagtaagcgcaaatatgatcctgccttatccaccgggcgtaccgctgttgatgcctggagaaatgctgaccaaagagagccgcacagtactcgattttctactgatgctttgttccgtcgggcaacattaccccggttttgaaacggatattcacggcgcgaaacaggacgaagacggcgtttaccgcgtacgagtcctaaaaatggcgggataacttgccagagcggcttccgggcgagtaacgtgctgttaacaaataaaggagacgttatgctgggtttaaaacaggttcaccatattgcgattattgcgacggattatgcggtgagcaaagctttctactgcgatattcttggtttcacgctgcaaagcgaagtctatcgcgaagcgcgcgacagttggaaaggggatttggcgcttaatgggcaatatgtgattgagcttttcagttttccgttcccgccggaacgacccagccgaccggaagcttgcggtctgcgtcatctggcttttagcgttgatgacatcgatgcggcagtggcgcaccttgaaagccataacgtgaagtgtgaaaccatccgtgtcgatccatacacgcaaaaacgcttcaccttctttaacgatccggacgggctgccgttggaactgtatgagcagtaaggcttgtcatcgccgcatttgcccggtaacgtgccgggcattgctactgtaaaatcgcaccatcatgacactcacgctcaatagacaacttctcaccagtcgccagattctggtggcctttagcggcgggcttgactccaccgttctgctgcatcagttggtgcagtggcggacggaaaatccgggtgtcgctctgcgcgctattcatgtgcatcacggtttaagtgccaatgccgatgcctgggttacgcattgcgaaaacgtctgccaacagtggcaggtgccgctggtggtcgaacgcgtacaacttgcgcaagaaggactgggcattgaggcccaggcgcggcaggcacgttatcaggcatttgcccgcaccttgttgcccggtgaagtgctggtcaccgcgcaacatctcgacgatcaatgtgaaacctttctgctggcgctaaaacgcggcagtggccctgccgggcttagcgctatggcggaagtcagcgagtttgccggaacgcggcttattcgcccgttgctcgcccgcacgcggggggaactggtgcagtgggcgcgtcagtatgatttacgctggattgaagacgaaagtaatcaggacgacagttacgatcgtaactttctgcgcctgcgcgtagtgccgttattgcagcagcgttggccgcattttgccgaagcaacggcccgcagcgccgcactttgtgctgaacaagagagcctgctggatgaactgctggcagatgatttagcacactgtcaaagcccgcaggggacgctgcagattgtgccaatgctggcgatgagtgatgcccgccgcgcggcgattatccgccgctggctggcagggcagaatgcaccgatgccttcccgcgacgcgttggtgaggatctggcaggaagtggcgctggcgcgggaagatgccagtccctgtttacgtttgggcgcgtttgaaatccgacgctatcagagccaactgtggtggattaaatccgtcaccgggcaaagcgaaaacattgtgccgtggcagacgtggcttcaaccgctggaattaccggcggggctgggaagtgtacagcttaatgcgggaggcgatattcgccctccgcgtgcagacgaagcggtcagcgtgcgtttcaaagcgccaggattgctgcatattgtcgggcgtaacggcggacgtaagctaaagaaaatctggcaagagctgggcgtgccgccgtggctacgtgacaccacgccactgctgttttatggcgaaacgctgattgcggcggcaggggtatttgtgacgcaagaaggtgtggctgaaggtgagaatggcgtaagttttgtctggcagaaaacgcttagttaagtgaaagccggataagacgcatcaaacgtcgcatccggcgaaagtcaatcaggattcgcttaccaccaccgtaccgatttccgggtggctaaagctggtaattttatccagacgcagctcgcgggtttcgccagcggcctcgacgaccaggtactccacatttttgcgggagactaaatcactggcttttgcctgcaatttttcgccatctttcagctcaagtgtcagcattaaatgatgctggcaggcgagctcaagattatcgtaatcatcacaattgattggttgatacgtatcattcattgacataatcgctcaccagtaagtttgccgcagcgtatgctgctttttccctgacagcctcagaaagggcgtcgtcggcagccatttcattcagcactttcaaaacgcagcccagcgcgtccggaacgtatcctaagtctccgctggcgatttccgcgtaccgcttgcgtattaactcacaatatttttccacatgccctcctgtcagcactctgacttaaccgtggatgcaagtctaagcctacgaagataaactctgtttcgcaaggtgactataccacactcatttctgcaatatcagcgccgcaactgcacgtattccgttacaatggcctcctgattcgaaaggagttttcttatggcgcttaaagcgacaatttataaagcgacggttaatgtggccgatctcgaccgcaaccagtttctcgatgcctctctgacgctggcgcgccatcctagtgaaacccaggagcgtatgatgctgcgcttgctggcgtggctgaaatatgctgatgaacgtctgcaatttacccgtggtttgtgtgccgatgatgagccggaagcgtggctgcgtaacgatcacctgggcattgatttgtggattgagctggggctgccggatgagcggcggattaagaaagcctgcacccaggccgcagaagtggcgctgtttacctataatagtcgggcggcgcaaatctggtggcagcaaaatcagagcaaatgtgtgcagtttgccaatctttccgtctggtatctggacgatgaacaactggcgaaagtaagcgcctttgccgatcgtaccatgacgctgcaggcaacgattcaggatggcgtgatctggttaagcgatgataagaataatctggaagtgaacttaaccgcctggcaacaacctagttgaactaaaccgcctggcaacaaccttcatgattgtgatttcccgacatgttgctattcccgatggtgagcttgagatcaccgccattcgtgcgcagggcgcgggcgggcagcatgttaataagaccagtacggctattcatctgcgttttgacattcgggcgtccagcctgccagagtattacaaagagcgtctgctcgccgccagccatcatttgatcagcagtgatggcgtgattgtcattaaggcacaggaataccgcagtcaggaactgaaccgcgaagcagctctggcccggctggtggctatgattaaagaattaacaacagaaaaaaaagcccgacgacccacgcggcccacccgtgcaagcaaagagcgcaggctggcaagcaaagcacaaaaaagtagcgtgaaggcgatgcgcggcaaagtgcgcagcggtcgggaataaaaagaaggaatggatggtgaaaaaagcgatagtgacagcgatggctgtaatcagcctctttactctgatgggatgtaataatcgggccgaagtcgatacgctttctccggcgcaggctgccgaactgaaaccgatgccgcaaagttggcgcggcgtgctgccgtgtgccgattgcgaaggaatcgaaacctctctgttcctcgaaaaagacggaacatgggtgatgaatgagcgttatctcggtgctcgtgaagaaccttcctccttcgcttcctacggtacatgggcgcgaaccgctgacaagctggtattaaccgacagcaaaggtgaaaagagttattatcgggcgaaaggcgatgcgctggagatgctcgatcgtgaaggcaatccgattgaaagccagttcaactatacgctggaagcggcacaatccagtttacctatgacgccgatgaccctgcggggcatgtatttttatatggctgatgcggcgaccttcactgattgcgcgaccggaaaacgtttcatggtagcgaataacgcagagctggagcgtagctacctggctgcgcgcggtcacagtgaaaaaccggtgttactgagtgtagaaggtcactttacgcttgagggtaatccggataccggtgcgccgactaaagtattggcacccgatacggcagggaaattttaccccaaccaggattgcagtagtttggggcagtaacccgtcttgagacagaaacaaacgcaaaacaggccagaaggatatatttcaacattttgaatttgcacgttttttgtaggccggataaggcgtttacgccgcatccggcaatggtgctcaacgcctgatgcgacgctggcgcgtcttatcatgcctacgacccccctcataccttaaggcggataaggcatttactttatcaccgggtcaaaccaacaaagcgacccgccttgatataaatcccaggcttcaggtgcccaacatactgtaactgcgtttctggcttaaacgcagagacatcaccaatacgcatatgcatcagatcggcagggctaatccagccgctttgcgccagtgtaagtggatgcccggctttggcaaaggcatccgtgacaaattcgctacaaaaccagctctttttgtctccttcgcccacactgcttaactgcgctttcgccaggccgctgacgcactgttggcgaaaatcctcggagaacggattcagactgcacatctggcgagtcaccataaagggaataaattcgacaatgccgcgatagttataaccgctatctttgattttattggcaaacgcggtgatatctgtggcttgttgcggggtaagatccgggactcgtaagacgaaaagcttatcactatgcttcatcgcttttttaagggaaacgatctggacgccagcgcctgtcgcttctgcaacgttattatcacccagaaagattgcaacgtgactcacagaggaagtgctgaagacgcggattccaaaactggttaccccaaggctactggagaacagcaaatcgccgggtttgagatcaggtgccgttatttcttttatactttgttcggtgaaagagctttgatgctggaatttgacagcccatgtttttgcctcggcatctactgctgtggcacttgggtctggctggctgatatcaacggtacaagcgctaagtaaaagaaagctggggagaaacaggcggcagtacgcctttggtttatccattttatacaatccatgtaaaaaaagggccctgaaattcaggaccctttctggcatcagcctttaatctgtttcaccagatattcgacgatgtcaccagtcttaattaactgtttctcgccgttgcgacgatatttatattcgatatcgtcgttgtcgaggttacggtcgcccagcacaatagtgtgcggaataccgatcagttccatatcagcaaacatcacgcccggacgctctttgcggtcatccagcagcacttcgataccttgtgcacgcagttcgctgtacagtttctcagcaagctcttgtacgcggaaggatttgtgcatgttcatcggcagaatcgccacctggaacggcgcgatagcgtcaggccatacgatgcctcgttcgtcgtagttctgctcaatcgccgcagctaccacacgcgttaccccgataccgtagcaacccatcgtcaggatttggttgcggccatcttcaccctgtacggaggctttcagtgcttcggagtacttggtacccagctggaagatgtgaccaacttcgataccacgtttgatcagcagcctaccctggccatccgggcttggatcgccagccaccacgttacggatatctgcaacttccggggtagcgacatcgcgatcccagttgatgccgaagtagtgtttaccatcgatgttagcaccagcagcgaaatcactcatcgccgcaacggtacggtcaatcaccaccggaatcggcatgtttaccggacccagactacccggaccggctttaaccacggcacgaatttcttcttcggtcgcgaaagtcagcgggcttgcaacctgcggcagtttttctgctttaacttcgttcagctcgtgatcaccgcgcaccagcagcgcaacctgcgggaagctgctgccttcaaccgctttaaccagcagagtcttaaccgttttctcaatcggcagattgaactgttcaaccagttccgcgatggttttcgcgttcggcgtatcaaccagcgtcatttcctgggtagcagcagcgcgcggttctttcggcgcgatagcttctgccagttcaatgttcgctgcatagtcagaggtgtcggagaagaccacatcgtcttcaccgctctgcgccagcacctggaattcgtgagaggcgctgccgccgatagaaccggtgtcggcttgtacggcgcggaaatccagccccatgcggctgaagattttgctgtaggccgcatacattgcatcgtaggtttcctgcagggattcctgagaagtatggaaagagtaagcatctttcatcaggaattcgcgggaacgcatgacgccgaaacgcggacgcacttcgtcgcggaacttggtctggatctgatagaagttcagcggcagctgtttgtaagagctaagctcgttacgaatcaggtcagtgataacttcttcatgagttgggccgagtacgaacggacgctcgccacggtcaacaaaacgcagcagttccggaccgtactgttcccaacgaccactctcttgccacaaatcggctggctgaaccaccggcatgctcacctcgatcgcaccggcgttgttcatctcttcacgcacgatgttttcgacttttttcagaacgcgcacgccggtcggcagccaggtatataacccggaggccagcttgcggatcatcccggcgcgcagcatcagctgatggctgatcacctcggcgtcggcaggtgtctccttgagagtggagagcaggtattggctagtacgcatgttgttacggttccagttggaaggtagaacaggctcaaggcgagcctgggacaaaaaaagtgatttagtttaccagtgcaaaagaaatgtcaaaagagaagggcgtgaatttaacgcggttccagcgcaaagacttcaaaacctgcgtcggtgacgcgccagcgaacgttaaaatcatgtagccagacggcataggttttgcccgtttcctcacctttacgataggccgggcgcgggtcctgcgccagtacttcgcggataaacagcgttaactgcggataacgcttctccagcgtcaaaagctgcttttcgacctctgcggtaaaactcaccgccatctctgcagctggcgcactttgcgcatagctggcactggcatcgggaaggctttcggcaaaggggagatacggtttgatatccactaccggcgtaccatcgaccagatccagactgccgagcttcagaatcacgctgtctttatggcaaacaacctctttcagctctaccaggctcatgccaattgggttagggcggaaagtagagcgtgttgcgaaaacccccattctggcgttaccgccgaggcgcggtggacgcacagtcggacgccagccgccttccatcgtttgatgaaagacgaaaaggatccataaatggctgaacgcttccaggccgcgaacggcgtcggcctggttgtagggagcaatgagatgcagttcgccgttggcgctttttaccagacctggctggcgcggaacggcgaacttttctttataggggctgcgaataacgcctatttgctcgaactggaaactgctcatttcgccgtaatgttaagcgcagaaccgatacatacagcctgacgatagcagcctggcgtaccgctggtgacttcgcagctatgcagtaatacagcattggctttcattttagaggcgttgatttgcatccgcttacgtgcggttggaatgctcggcggagagtcctgattagaggcctggcaagagtcgccactgacttcaccgagatcgcggaacggtttgccgactaattcttctgcattggtataaattcggaccggcgtggcgcgcggcgctttcggttttgcaggctccgctttcggctggggtgcagtgctttgaacgggttcgacaggggatctgcttaacatggaacagccgcttagcatgagtgctactaaacagatcggtaaagcacgcatagtatttcctcaatgtatgatcaaaacgtcaatattgaatcaggagcttgtaaaaatgacaagacgggcaagcgcccgtcctgaatgatattacaaattgtggaaacagcctaaaaattaccagcctttaacagctccgccgttaaacactttgtttgctgcttcgtaaacttcgtcagactgataagcctggacgaatttcttcacgttctcggcgtctttgttatcttcacgcgtcacgatcaggtttacgtacggggactctttatcttcaacaaagataccgtctttcgccggagtcaggccaatctggctggcataggtggtattgataactgccagagcgatttgcgcgtcgtccagagaacgcggcagttgcggtgcttccagttcaacaattttcagatttttggggttctcaacaacatcaagaacggtcggcagcaggccaacgccatctttcagtttgatcaagcccactttttgcagcagcagcagactacgaccaaggttagttgggtcgtttggcacggcaacctggctaccatcctgcagttcatccagacttttgattttcttggagtaaccagcaatcggataaacaaaagtgttgcctactgcgaccagtttgtagccacgatctttcagttgctgatcaaggtacggtttatgctggaaggcgttggcgtcgatatcgcctttgctcaatgcttcgtttggcagaacatagtcgttgaaggttaccagctcaacgtccaggccatatttgtctttcgcaactttctgcgcgacttctgcaacctgctgttcggcaccaacaatcacgccgactttaatgtggtttggatctttttcatcctgaccgcagcctaccagtgccagacttccgatcagggctcccactgccgcaaaggttttgaatttgaacgccataccttattccttcttcaattatttatgttgtgttgaacgttacttgcgagtgacagcccggacgatgcggtcgcctgcgaactgaattaaataaaccagaatgaccagcaataccagtaccgtattcatcaccgtcgcgttatagccgatgtagccatactgatagccaatctgacctaaaccaccggcaccgactgcaccacccatcgcggaataaccgaccagggtaatcagggtgatagttgccgcattcaccagacccggcagcgcttccggtaacagcaccttacggacgatctgcatcggcgtggcacccattgcgcgggaagcttcaattaacccggttgggatctccagcagagcgttctcgaccatacgggcaataaacggtgctgcaccaacggttaacggaacaatcgctgcctgcaaaccaatgcttgtaccgacaataacgcgggtaaacggaatcatccatacaagcaagataatgaacgggatggaacggaaaatgttcacaatcgcagaaacggtacgatacagcttcgcgttagcaataatttgccccggacgcgtgacataaagcagaacgccaaccggcagaccaatcacaaagccaaaaaaaccggatacgaaggtcattgccagcgtttcccatacgccacgaaccagcagccacatcatcggctcagacataacccagtacctctacttttacatggtgttcctgcagccaggcaatggcggcttgcgtatcttgttgtgtgccgtgcatttcagtcagcatgatgccgaacttaacgccaccggcgtaatccatctgcgcgctaataatgttgttgttgacgttgaaacgacgcgcggtttcagaaagcagtggggcatcgacgctttgaccggtaaactccagacgcagcatcggcacgcagtcagtaaatggctccgcttgcagacgttcctggtaatcttccgggatatccagatgcagggtgctctgaataaacttctgcgccagcggcgttttcggatggctgaacacttcacttaccgtgtcctgctcgatcagttctccattgctgatgaccgccacgcaatcacaaatgcgcttcacaacgtccatttcgtgggtgatcaacagaatcgtcaaccccagacggcggttgatgtctttcagcagttcgagaatagaacgtgtcgttgccgggtccagcgcgctggtggcttcatcacacagcaatactttgggattgctggctaacgcacgggcaattgccacacgttgtttctgcccaccggaaagattgctcgggtagctatcatgcttatcgccaagaccaaccaaactcagcaattccgtcacgcgacgtttgacctcgtctttcggtgtgttgtccagctccagcggcagagccacgttgccaaaaacagtacggctagagagcaggttaaaatgctggaaaatcataccaatctggcggcgagctttggtcaactcggattcactcagcgtggtcagttcctggccatcgaccagcacgctaccctcggttgggcgctccagcaggtttacacaacgtataagcgtactcttacccgcgccactggcaccgataacgccataaatttgtccagctggcacatgcaggctgacgttgttcaacgcctggatggtgcgggtgccctggtggaacactttggtgatattgctaagttttatcattgattatttattatcgtcattaagttagtcgtggcatctcgaatgcctgaaacgggcaacgccgtcaatgaaatggatgttaaggcatccagacgtctaaatcaatcaggtttatgcgaagagcactttcttgcaggtcgaaacatgcgatactagcgtcacatgccttattaaggagctataaaaggtggcgaagagcgtacccgcaatttttcttgaccgtgatggcaccattaatgtcgatcacggctatgtccatgagatcgacaactttgaatttatcgacggtgttattgacgccatgcgcgagctaaaaaaaatgggctttgcgctggtggtagtaaccaaccagtctggcattgctcgcggtaaatttaccgaagcacagtttgaaacgctgaccgagtggatggactggagcctggcggaccgagatgtcgatctggatggtatctattattgcccgcatcatccgcagggtagtgttgaagagtttcgccaggtctgcgattgccgcaaaccacatccggggatgcttttgagtgcacgcgattatttgcatattgatatggccgcttcttatatggtgggcgataaattagaagatatgcaggcagcggttgcggcgaacgtgggaacaaaagtgctggtgcgtacgggtaaacctattacgcctgaagcagaaaacgcggcggattgggtgttaaatagcctggcagacctgccgcaagcgataaaaaagcagcaaaaaccggcacaatgattaaaagatgagcggttgaaataaaaatgcatttttccgcttgtcttcctgagccgactccctataatgcgcctccatcgacacggcggatgtgaatcacttcacacaaacagccggttcggttgaagagaaaaatcctgaaattcagggttgactctgaaagaggaaagcgtaatatacgccacctcgcgacagtgagctgaaagccgcgtcgcaactgctctttaacaatttatcagacaatctgtgtgggcactcgaagatacggattcttaacgtcgcaagacgaaaaatgaataccaagtctcaagagtgaacacgtaattcattacaaagtttaattctttgagcatcaaacttttaaattgaagagtttgatcatggctcagattgaacgctggcggcaggcctaacacatgcaagtcgaacggtaacaggaagaagcttgcttctttgctgacgagtggcggacgggtgagtaatgtctgggaaactgcctgatggagggggataactactggaaacggtagctaataccgcataacgtcgcaagaccaaagagggggaccttcgggcctcttgccatcggatgtgcccagatgggattagctagtaggtggggtaacggctcacctaggcgacgatccctagctggtctgagaggatgaccagccacactggaactgagacacggtccagactcctacgggaggcagcagtggggaatattgcacaatgggcgcaagcctgatgcagccatgccgcgtgtatgaagaaggccttcgggttgtaaagtactttcagcggggaggaagggagtaaagttaatacctttgctcattgacgttacccgcagaagaagcaccggctaactccgtgccagcagccgcggtaatacggagggtgcaagcgttaatcggaattactgggcgtaaagcgcacgcaggcggtttgttaagtcagatgtgaaatccccgggctcaacctgggaactgcatctgatactggcaagcttgagtctcgtagaggggggtagaattccaggtgtagcggtgaaatgcgtagagatctggaggaataccggtggcgaaggcggccccctggacgaagactgacgctcaggtgcgaaagcgtggggagcaaacaggattagataccctggtagtccacgccgtaaacgatgtcgacttggaggttgtgcccttgaggcgtggcttccggagctaacgcgttaagtcgaccgcctggggagtacggccgcaaggttaaaactcaaatgaattgacgggggcccgcacaagcggtggagcatgtggtttaattcgatgcaacgcgaagaaccttacctggtcttgacatccacagaactttccagagatggattggtgccttcgggaactgtgagacaggtgctgcatggctgtcgtcagctcgtgttgtgaaatgttgggttaagtcccgcaacgagcgcaacccttatcttttgttgccagcggtccggccgggaactcaaaggagactgccagtgataaactggaggaaggtggggatgacgtcaagtcatcatggcccttacgaccagggctacacacgtgctacaatggcgcatacaaagagaagcgacctcgcgagagcaagcggacctcataaagtgcgtcgtagtccggattggagtctgcaactcgactccatgaagtcggaatcgctagtaatcgtggatcagaatgccacggtgaatacgttcccgggccttgtacacaccgcccgtcacaccatgggagtgggttgcaaaagaagtaggtagcttaaccttcgggagggcgcttaccactttgtgattcatgactggggtgaagtcgtaacaaggtaaccgtaggggaacctgcggttggatcacctccttaccttaaagaagcgtactttgcagtgctcacacagattgtctgatgaaaatgagcagtaaaacctctacaggcttgtagctcaggtggttagagcgcacccctgataagggtgaggtcggtggttcaagtccactcaggcctaccaaatttgcacggcaaatttgaagaggttttaactacatgttatggggctatagctcagctgggagagcgcctgctttgcacgcaggaggtctgcggttcgatcccgcatagctccaccatctctgtagtggttaaataaaaaatacttcagagtgtacctgcaaaggttcactgcgaagttttgctctttaaaaatctggatcaagctgaaaattgaaacactgaacaatgaaagttgttcgtgagtctctcaaattttcgcaacacgatgatggatcgcaagaaacatcttcgggttgtgaggttaagcgactaagcgtacacggtggatgccctggcagtcagaggcgatgaaggacgtgctaatctgcgataagcgtcggtaaggtgatatgaaccgttataaccggcgatttccgaatggggaaacccagtgtgtttcgacacactatcattaactgaatccataggttaatgaggcgaaccgggggaactgaaacatctaagtaccccgaggaaaagaaatcaaccgagattcccccagtagcggcgagcgaacggggaggagcccagagcctgaatcagtgtgtgtgttagtggaagcgtctggaaaggcgcgcgatacagggtgacagccccgtacacaaaaatgcacatgctgtgagctcgatgagtagggcgggacacgtggtatcctgtctgaatatggggggggaccatcctccaaggctaaatactcctgactgaccgatagtgaaccagtaccgtgagggaaaggcgaaaagaaccccggcgaggggagtgaaaaagaacctgaaaccgtgtacgtacaagcagtgggagcatgcttaggcgtgtgactgcgtaccttttgtataatgggtcagcgacttatattctgtagcaaggttaaccgaataggggagccgaagggaaaccgagtcttaactgggcgttaagttgcagggtatagacccgaaacccggtgatctagccatgggcaggttgaaggttgggtaacactaactggaggaccgaaccgactaatgttgaaaaattagcggatgacttgtggctgggggtgaaaggccaatcaaaccgggagatagctggttctccccgaaagctatttaggtagcgcctcgtgaactcatctccgggggtagagcactgtttcggcaagggggtcatcccgacttaccaacccgatgcaaactgcgaataccggagaatgttatcacgggagacacacggcgggtgctaacgtccgtcgtgaagagggaaacaacccagaccgccagctaaggtcccaaagtcatggttaagtgggaaacgatgtgggaaggcccagacagccaggatgttggcttagaagcagccatcatttaaagaaagcgtaatagctcactggtcgagtcggcctgcgcggaagatgtaacggggctaaaccatgcaccgaagctgcggcagcgacgcttatgcgttgttgggtaggggagcgttctgtaagcctgtgaaggtgtactgtgaggtatgctggaggtatcagaagtgcgaatgctgacataagtaacgataaagcgggtgaaaagcccgctcgccggaagaccaagggttcctgtccaacgttaatcggggcagggtgagtcgacccctaaggcgaggccgaaaggcgtagtcgatgggaaacaggttaatattcctgtacttggtgttactgcgaaggggggacggagaaggctatgttggccgggcgacggttgtcccggtttaagcgtgtaggctggttttccaggcaaatccggaaaatcaaggctgaggcgtgatgacgaggcactacggtgctgaagcaacaaatgccctgcttccaggaaaagcctctaagcatcaggtaacatcaaatcgtaccccaaaccgacacaggtggtcaggtagagaataccaaggcgcttgagagaactcgggtgaaggaactaggcaaaatggtgccgtaacttcgggagaaggcacgctgatatgtaggtgaagcgacttgctcgtggagctgaaatcagtcgaagataccagctggctgcaactgtttattaaaaacacagcactgtgcaaacacgaaagtggacgtatacggtgtgacgcctgcccggtgccggaaggttaattgatggggttagcgcaagcgaagctcttgatcgaagccccggtaaacggcggccgtaactataacggtcctaaggtagcgaaattccttgtcgggtaagttccgacctgcacgaatggcgtaatgatggccaggctgtctccacccgagactcagtgaaattgaactcgctgtgaagatgcagtgtacccgcggcaagacggaaagaccccgtgaacctttactatagcttgacactgaacattgagccttgatgtgtaggataggtgggaggctttgaagtgtggacgccagtctgcatggagccgaccttgaaataccaccctttaatgtttgatgttctaacgttgacccgtaatccgggttgcggacagtgtctggtgggtagtttgactggggcggtctcctcctaaagagtaacggaggagcacgaaggttggctaatcctggtcggacatcaggaggttagtgcaatggcataagccagcttgactgcgagcgtgacggcgcgagcaggtgcgaaagcaggtcatagtgatccggtggttctgaatggaagggccatcgctcaacggataaaaggtactccggggataacaggctgataccgcccaagagttcatatcgacggcggtgtttggcacctcgatgtcggctcatcacatcctggggctgaagtaggtcccaagggtatggctgttcgccatttaaagtggtacgcgagctgggtttagaacgtcgtgagacagttcggtccctatctgccgtgggcgctggagaactgaggggggctgctcctagtacgagaggaccggagtggacgcatcactggtgttcgggttgtcatgccaatggcactgcccggtagctaaatgcggaagagataagtgctgaaagcatctaagcacgaaacttgccccgagatgagttctccctgactccttgagagtcctgaaggaacgttgaagacgacgacgttgataggccgggtgtgtaagcgcagcgatgcgttgagctaaccggtactaatgaaccgtgaggcttaaccttacaacgccgaagctgttttggcggattgagagaagattttcagcctgatacagattaaatcagaacgcagaagcggtctgataaaacagaatttgcctggcggccgtagcgcggtggtcccacctgaccccatgccgaactcagaagtgaaacgccgtagcgccgatggtagtgtggggtctccccatgcgagagtagggaactgccaggcatcaaattaagcagtaagccggtcataaaaccggtggttgtaaaagaattcggtggagcggtagttcagtcggttagaatacctgcctgtcacgcagggggtcgcgggttcgagtcccgtccgttccgccacttattaagaagcctcgagttaacgctcgaggttttttttcgtctgtatatctattattgccagaatcgcaaaaatcctctgcattttacgctctttttcctcaacagtctgaagcccataatcacctcagttaacgaaaatagcattaaaagaggcatattatggctatccctgcatttggtttaggtactttccgtctgaaagacgacgttgttattagttctgtgataacggcgcttgaacttggttatcgcgcaattgataccgcacaaatctatgataacgaagccgcagtaggtcaggcgattgcagaaagtggcgtgccacgtcatgaactctacatcaccactaaaatctggattgaaaatctcagcaaagacaaattgatcccaagtctgaaagagagcctgcaaaaattgcgtaccgattatgttgatctgacgctaatccactggccgagtccagacgatgaagtctctgttgaagagtttatgcaggcgctgctggaagccaaaaaacaagggctgacgcgtgagatcggtatttccaacttcacgatcccgttgatggaaaaagcgattgctgctgttggtgctgaaaacatcgctactaaccagattgaactctctccttatctgcaaaaccgtaaagtggttgcctgggctaaacagcacggcatccatattacttcctatatgacgctggcgtatggtaaggccctgaaagatgaggttattgctcgtatcgcagctaaacacaatgcgactccggcacaagtgattctggcgtgggctatgggggaaggttacagtgtaattccttcttctactaaacgtaaaaacctggaaagtaatcttaaggcacaaaatttacagcttgatgccgaagataaaaaagcgatcgccgcactggattgcaacgaccgcctggttagcccggaaggtctggctcctgaatgggattaagcctctctgacagctcctccgggagctgtttttacatgctcgctaaggaaatcgataaaagcccggatgcgcgtacttaccgcacggtcgctgtaatagacggcactgaatggcatttccactggcaacactttatctgccattaactccaccaattctccgcgagcgatttctttgtcgatcatgtagtcggacaaacacgcaatcccgttgccactcaggcaaagctgtttcagtgtttccccactattggaactcaaaccgtacttcacctcatgtaattgtccatcgctacgggctatcggccaggtattgagggaagcgggttcagtgaatcccaggcaaatatgttgctttaaatcgtcgatcgtttctggcttcccgtagcgggaaatataatcgggggaggcgataatttttcgataactgttaaataacggcctggcacgtaagctggaatccgttaacgtaccagcgcgtatcgcgacatccacttttctttcgatcaaattaataatcgtttcggaggagactaggctcaaagtgacttccggatagcgttcacggaaaggcttaattaacggcatcagaaagtgcagcaccactggagttgcggcatcgatccgtaacagtccacgcggtgtattacgcgtctccataatttcactttctgccgctgccatctcctgcaaaatactctgtacgcgacgaaaataacgctcgccttcttccgtcaggctaagttgtcgcgtggtccgattaagcaggctaacgccaagtttcatctccagctttttcaccgcccggcttaccgcactgtttgcttgccctaattgttccgctgcccggctaaagctgccgctttcgacgacgctaacaaaaatggcgagttcttcgctcgtggctttcatttttgctcctgttgcaaaatagaagagatattttgaatttatttgtcattaaaccatcaggatgcgtgatatgtcatgcgatttaatgttctccataatgagcaaaattctgaccggtgtaagcacttgcttacataacaatatacaattgctcgttgaaagagtgagctaaaatccctataacagtagaaccctcccgagtgcggaagggttgacgtaatagaggtttcaaagtcaaaagtgcgaaaaaacacctatgccatgcgctatgttgccggacaacctgcggaaaggatcttaccgccggggtcttttgcgagcatcggccaggcattaccacctggggaaccgttaagtaccgaagagcgtattcggatcctggtgtggaacatatacaaacagcaacgcgctgaatggttgagcgtattaaagaactacggcaaagatgcacatctggtgttattgcaggaagcgcagacaacgccagagttagtacagtttgcgaccgctaactatcttgccgccgatcaggtacccgctttcgtgctgccacaacatccttctggcgtaatgacccttagcgcggcacatccagtgtattgctgcccgttacgtgaacgagaacccattttgcgtctggcgaagagcgcactggtgacggtctatccattacctgacacccgcctgttgatggtggttaatatacacgccgtcaacttcagtctgggcgtggatgtctatagtaagcagttacttcctattggcgatcagatagctcaccacagcggcccggtcattatggcgggagatttcaatgcctggagccgtagaaggatgaacgcgttatatcgctttgcgcgggaaatgagcctgcgccaggtgcgttttaccgatgatcagcgccgtcgggcgtttggtcgcccgctcgattttgttttctaccgtggtctgaacgtcagtgaagcttctgtactggttacgcgcgcttccgatcacaatccgctactcgttgaattcagtcccggcaagcctgataaataaggtatgagtggtctgccacagggcagaccaacgtttggcgctgcgcaaaacgtgagcgcggtggtggcgtatgacttatctgcccacatgctggatgtcgtggcacaagctgccgaagcccggcaactgaaaaatatcaccacccgccagggatatgccgaaagtctgccatttgccgataacgcatttgatattgttatcagccgttattctgcccatcactggcatgatgttggtgcagcactgcgagaagtgaataggatattgaaacctggcggtaggctgattgtgatggacgtaatgtctccgggtcacccagtgcgcgacatctggttacagacggtagaagcattacgcgatacctctcacgtacgaaactacgccagcggtgagtggttgacgttaatcaatgaagccaatctgatagttgataatttaattacagataagttaccgctggaattttctagttgggtcgcgagaatgcgtacgccagaagcgttagtagacgctattcgcatttaccaacagagcgcaagcacagaggtgagaacgtattttgccttgcagaatgatggctttttcaccagtgatatcatcatggtagatgcacataaagcggcataaataaaaaaggcaccgggggaatcggtgcctttttattatctggtttgtcaggaatctggcatgttgttgtttttcacaaacaacgtcagcttatcgcctggttgcagattcgcagtgtcgctgttccagcgcatcacatctttgatgttcacgccgtggcgtttagcaatgctactaaggctatcgcctttgcgcacacgatacgtaatgctatcgctgttgtttgccagtcgctgtgcgctactgcctgcaccaatcgtcaaactttggcctggcttcagcttagatccgcgcagtttgttccactgctgcaaatctttggtgcttacgccgagacgactagcgatactactaagcgtgtcgccagagcgtacggtgtaaacacggctgttaagcggcgtattgtcggcaaccagcgtgctctgtacagcagcaatttcgccactagccagagattcacgcagttgatctgcatgcttctttggcaccatcacgtactgcgggccacttgcgcccagcgtggagccttttacgccagcgttgaatgtcttcagcttgctgacggaaatccccgccatatctgctaccttcgccatttcaaccgggctgctcaggtgcacacgcgccagagcacggctttcatcggtcgttggcagacgtacgccataacgcttgctgtttttgagaatatcactcaatgccagcattttaggcacgtactgcttcgtttcctgcggcaacggtaagctccagaagtccgtggatttcccacgcgctttgttcgttttaattgccttcatgacccgaccttcgccgctgttataagccgctacggtcagaagccagtcgccgtcaaacattttgttcagacgctgcatcatattcagcgcggcagttgcactagcaacaacatcgcgacgcgcgtcataattgcgggtctgtttcaaaccataattgcgccccgtgctcggaatgatctgccagatgcctgcggcattggcgccagacgttgcgtgaggatcaaaagcgctctccactatgggtagtagtaccagttccataggcatgttacgttttttaacttgccctgctatccagtacatatacggctctgcccgtaaagttacatcgtggagatagctcttattgcgtaaatatttctgtttctgttcgcgaatccggtcattttccggaattcccatctttagctcgtcgccaatgaaagcccacaagtcaccatctggcgcgatagacgtcccatcgtccatccatcgtgcctgacttgtaaactttgctgcttccccttgaccagctgcagaaaggctctgtgcgtgctgttgaacgttgccggtactctggcaacccacgagcaggacagaggcgagtaatatcgcttttgccttcatgtgtgtgtcaatagttgcttaaaagacgaccgatcataacggcgaacggagccgatgacaagaaagttttatcagaacctatctttcttactccttaaccatgcaaaacgctcttcaggttgttgcaataatgtttcttcattaattacattaattaaatcaatatcttccgttcttaaaaaaacattaatttgccgctcatttttcagaattacgggtagtgttatttgattttttgcccgtaactccttaactttacgataataatcatttatggacaaatcgtgcggaagaatactcaaagcaaacttcatattacttaaggtatattcatgagcacaacataccaatgtatcgtcaggtaacgcacttaactttttaagactttgatacatttgacttgctgtcccttcaaacaaccgaccacacccaccagaaaacagtgtgtcgccgcaaaatagataaggtttactgaagtaacagatatgtcctaaagtgtgacccggcgtagcaattacactaaattcatgccccaaaacgaaggcagtttcgccatctttgactacctgtgttgttcccttatcttgtgtctcttgtggaccatacaccacaatttgtggaaacttttccaccagttcttttacgccgccaacgtgatcgtggtgatggtgggtgagaaatatggcctccggttgccagttattggcggcaatggcgtttaatactggctctgcgtctccgggatcgacaatcaggcagcgacctgcttcatcattcaaaacccagatgtaattgtcatcaaaggcgggaatactgttaagattcatagattacctctcagtgtgaaacggaaggttgtgatgaaaccggcaagagtccctcaaactgtcgtggctcctgattgctggggcgatttgccctggggaaagctttatcgcaaggcgctggagcgccagctcaacccgtggttcactaaaatgtatggttttcatctgcttaagattggcaatttaagcgcagaaatcaattgcgaagcgtgcgcggtttctcatcaagtgaatgtttctgcgcaaggaatgcccgtccaggtacaggcggacccacttcatcttccttttgccgataaatccgttgatgtttgtctactggcacatacattgccgtggtgcaccgatccgcatcgtttattgcgtgaagccgatcgggtattgattgatgatggctggctggtcattagtggcttcaatcccatcagttttatgggattacgcaaacttgtgccggtattgcgcaaaaccagcccctataacagccggatgtttactctgatgcggcagctggactggctctctttgttgaattttgaagtgctacacgccagccgtttccacgttctcccgtggaacaaacacggaggaaaactattgaatgcgcatattcctgcgcttggttgcttacaacttattgttgcccggaaacggactattcctttaacgctaaatccgatgaaacagagtaaaaacaagccacgaattcgccaggcggttggagccacccggcaatgtcgtaaaccacaggcttaaacttcaacttggtagcctgtatcttccagtgtgggattcatcgccgcggcacgagccagttcatcacagcgttcgttttccgggtgtccggcatggcctttaacccattcccatttgatttgatgctgccccaatgcagcatcaagacgttgccagagatcgacattttttactggttttttgtctgcggttttccagccacgttttttccagttatggatccactgggtgataccctggcggacatactggctgtcggtactcaaaatgacttcgcaatgttcttttaacgcctccagcgcgacaatagcggccatcaactccatacggttgttggtggtgcgggtgtagccagcgctaaaggttttctcgcgtccgcgatagcgtaaaatagcgccgtaacccccaggtcctggattgcccagacagctaccatcggtgaaaatttctacctgtttaagcatctctggtagacttcctgtaattgaatcgaactgtaaaacgacaagtctgacataaatgaccgctatgagcactgcaattacacgccagatcgttctcgataccgaaaccaccggtatgaaccagattggtgcgcactatgaaggccacaagatcattgagattggtgccgttgaagtggtgaaccgtcgcctgacgggcaataacttccatgtttatctcaaacccgatcggctggtggatccggaagcctttggcgtacatggtattgccgatgaatttttgctcgataagcccacgtttgccgaagtagccgatgagttcatggactatattcgcggcgcggagttggtgatccataacgcagcgttcgatatcggctttatggactacgagtttagcttgcttaagcgcgatattccgaagaccaatactttctgtaaggtcaccgatagccttgcggtggcgaggaaaatgtttcccggtaagcgcaacagcctcgatgcgttatgtgctcgctacgaaatagataacagtaaacgaacgctgcacggggcattactcgatgcccagatccttgcggaagtttatctggcgatgaccggtggtcaaacgagcatggcttttgcgatggaaggagagacacaacagcaacaaggtgaagcaacaattcagcgcattgtacgtcaggcaagtaagttacgcgttgtttttgcgacagatgaagagattgcagctcatgaagcccgtctcgatctggtgcagaagaaaggcggaagttgcctctggcgagcataaatacctgtgaaaggcgctaaaaatagcgacttgggcgatttttgcagcaaacgattcaaaagatgagaaaaaccgttgacgaaggtcgaggcaatccgtaatattcgcctcgttcccaacggaacacaacgcggagcggtagttcagtcggttagaatacctgcctgtcacgcagggggtcgcgggttcgagtcccgtccgttccgccactattcactcatgaaaatgagttcagagagccgcaagatttttaattttgcggtttttttgtatttgaattccaccatttctctgttcaatgattttactctggcgtaggtgcgtgattctcgcttgttgtctcattcattaaaattcaataatgatatcgaaccattcagcttaaatatatttctagagaataaatttatattgattaaatgaatgtatatttcaaattgattttgtttgttattatttaagtgaggtatataattagagtccgttatcaatgctaaatattctaatcattatgacaggcgagggagtgtccaattatgaatagtaaaaagctttgttgcatatgtgtgttattcagcctgcttgcaggatgtgcctctgaatcttctattgatgaaaagaagaaaaaagctcaagtcacacaaagtaatattaataaaaacactccccagcaactgacagacaaagatttattcggtaatgaaaccactctggccgtatccgaagaggatattcaagctgcgcttgatggagatgagttccgcgttccccttaattctcctgtaatacttgttcaatccggcaaccgcgcaccggaaaccattatgcaggaggagatgcgaaaatattatactgtttccacattctctggtatcccggacaggcaaaagcctctgacttgtaacaaaaacaaagataaaaatgagaacgaggatgttgccagtgctgagaatatgaactggatgcaggcactgcgttttgtggctgcaaaaggacatcagaaagcgattattgtttaccaggatatgttgcagacaggaaaatatgactctgcgctgaaaagtacagtatggtccgactataaaaatgacaaactcactgacgctatctccctgcgctacctggtacgtttcacgctggtggatgtggcaacaggtgagtgggctacctggagcccggtgaattatgaatataaagtgcttccaccattgcccgacaagaatgaagccagtacgactgatatgacagagcagcaaatcatgcaacttaagcaaaagacctataaagcgatggtaaaagatttggttaaccgctatcaataataaattatatctgccgccaggaatttctggcggcaataatacaaaattctttgcataagaaatttttcttgacaaagacagtgcaagaaaggacatggaatccggagttaaaaactgtttgttttagaatatttaattatttaactgctgaatcttccttgcgagaaatatatccattattacatttcatgccatttttaatatagattgctcctgggaaaattcccgtattattaccgcaggggtgataattagtattgacatatcctgtgacaaaaggagctattaaaggtgctattacgatagctattagtaaaaatataagagttagctgtattgttatgtctgtggcgaaattgactaccttcgtttttttgattaagaatgattttattatcgtaagtaaaattacatgaatatttaaaaaggaaaacgacatgaaaccgaagcacagaatcaacattctccaatcataaaatatttccgtggagcattttattattgaatatagaggtttaactccggtaaaaaacaaagaagcattgaatgcagggaaaaataatatggccataaaaaacatcgaaagaaactcttttaatttaacatgtaaacgcatggttaatcctcatatcacgggtggagtgttaagaacatacataaatggagtcatgttttcccttttccatttatcaagttcctgttgccgttttagtccatctctaattgcatattttaatttttcacttaaatggcattgagcatcgatttcatttaaaacaactgtacacactatccctgtcagtaaaattgctcctccgacaagaattactggaaagccaaagctaacacaggcaaaagaagccagacttccaatagcggttgcaacaccaccggctataactgctttggccacatccatactaaaatcgccaagaaaattaaccagatctcgctcactactcataataaattctatggttctgctgatttaaccgcagagaagttcgccacagcaatccgaaaccactggcacgtggagaataagctgcacaggcgtctggacgtggtaatgaatgaagacgactacaaaataagaagaggaaacgcagcagaattatttagtgggatacggcacattgctattaatattttgacgaatgagaaggtattcaaggcagggttaagacgtaagatgcgaaaagcagccatggacagaaactacctggcgagtgtccttgcggggagcgggcttagctaataataccccgactctccccgtccttaaacacaacccccactcaccacaacctaaactcatccgcatcctgccatgccggaaacttttctctatattcccgcaatgctgccatgctcagctccgcatcaatgcgcgttgcctgatgcgcgtcggcagtagcgataatctctccttgcggattaatcacccggctgtcaccgcgataatggcagccgttgccatcgctgccgacgcgattgcatcccgccacatacgcctgattctcaatcgcgcgggccgtcagcaatgcctgccagtgcagagagcgcggagcaggccagttggcgacgtacagggcgaggtcataatcgttgagattgcggctccacacaggaaaacgtaagtcgtagcacaccagcggcaaaatacgccagccgcgccattccacaatcactcgcgcattgcccgctttataatgtagatgctcatctgccatgcggaacagatgacgcttatcataaaaatgtaccgtgccgcccggctcaaccagcaaaaagcggttaacgctaccagactccgtttgtaatgcaacactgcctgcaatcagcgcattgcactgctgcgccttagctgtcatccagttcactacgtcatcttgtgctaggctgctagctgccgcttccatggcaaagccgctggtaaacatctccggtagaacgatcacatcgcgcccggtaataccttccagttgacgatcaaaatgacgcaggttggcaggaccatccatccacaccagtggttgctgcaaaagcgtaatcttcaaaccaggcacggtgtacaactcctttatgcgaagggttttataactttaacaccttatcaggcagttgccttagcgcagaataaattgataacaaatgctgatattggaaatatctgatttgcaaattatcgtgttatcgccaggctttaggaggttaataacatgggcaggataagcagcggaggaatgatgtttaaggcaataacgacagtcgccgctctggtcatcgccaccagtgcaatggcgcaggatgatttaaccattagcagccttgcaaagggcgaaaccaccaaagctgcatttaatcagatggtacaagggcataagctgcctgcctgggtgatgaaaggcggtacttatactcccgcacaaaccgtaacgttgggagatgagacgtatcaggtgatgagcgcgtgcaaaccgcatgactgtggcagccaacgtatcgctgtgatgtggtccgagaaatctaatcagatgacggggctgttcagcactattgatgagaaaacgagccaagagaaactcacctggctgaatgtgaacgatgcgcttagcattgatggtaaaacggtgttgttcgcggcgttgaccggcagcctggaaaaccatccggatggctttaattttaaataattagcggataaagaaacggagcctttcggctccgttattcatttacgcggcttcaactttccgcactttctccggcaactttaccggcttcgtcgccagctcttccggatcaaagtcatcaacgttaatactgcgcagacggctttcttcagctttcaccagaatagcggcttcatctttatcaatcagccccttcaccagcgcgttgtgcgccagttcatccagacgggtaaacggcaggtttttacccagctctttacagatccgctgatgaattgggtcggcggcaatcacatccaccagcgcctcttccagcaagccaaccggattatgctcgctcggcgtcaggtactgaccgcgaccaatgcgggaacgggtggcgttcggcacttgtaaaatcttcgccactttatgatccagcttgtcagaaggtgccagataatgacgtccggtcgggaagatcaccacattcagcagcccggcaaccacgcggttcgggaagttttgcagtaaatcatccatcgcctgttcagcctgatacagcgcatcttgtacgccccagtgcaccagcggcaggtcggcttcattacggccttcgtcgtcataacgcttcagcacggcagaggcgaggtagagctggcttaaaatatcccccagacgggcgctgatgcgctcgcgacgtttcaggctgccgcccagcactgccatgctgacatcagaaagcagggcgaggttggcgctcaggcggttcaggtgctgatagtagcgtttagtggcatcgccggttggcgtgctgctggttaaaccgcgcgtcaggcccagccagaagctgcgaactttgttgctaccgacgtgaccgatatgtttgaacaacagtttatcgaacgcgttgacgtcattgttcttcgccgcttccatctcttccagcacgtacggatggcaacgaatcgctccttgtccgaagatcatcatgctgcgggtcagaatgttagccccttcaacggtgatggcaatcggtgcgccctggtaagcacgcgccaggaagttgctttgcccgagcataatgcctttaccgccggtaatatccatcgcatcaataatgttctgctgcccgcggtgggtacagtgatacttaacgatagcgctcagcacggcaggtttttcgccgagcataatgccgtaggtaatcaggcttgccgcagcatccatcacgtaggcattaccggcaatacgcgccagcggctcttcaatcccttccatcttaccaatagagattttgaactgacggcgaatgtgagcatacgcgccggttgccagcgctacgcttttcacgccgccggtactgttggaaggcagggtgatgccgcggcctacgctgaggcactccaccagcatccgccagccttgcccggccattttcggcccgccgatgatgtaatcgatcggcacgaagacatctttaccgcgcgtcggtccgttctggaacggtacgttcagcgggaagtggcgacgaccaatttccacgcccggcgtggtggttgggatcagcgcacaggtaatgcctaaatcttctgcaccgccgagtaatttttccgggtcggagagtttaaacgccagcccaagcacggtcgcaatcggtgccagcgtaatgtagcgtttgttccaggtcagacgcatccccagcacctgctggccctgccattcgcccatgcagacaatcccggtgtccggaatcgcgcccgcatcggaacccgcttccgggctggtcagtgcaaagcaggggatctcctgaccacgcgccagacgcggcagatagtgatctttctgctcgtcagtgccgtaatgttgcaacagttcgcccgggcctaaactgtttggcacgccgacggtaatcgccaggatcccgctcacgccggagagtttttgcagcacgcgagactgggcataagcgctgaactccagcccgccgtactcttttttgatgatcatcgcgaagaaacgatgctctttaaggtacgcccacaactccggcggcagatccgccagctcatgggtgatctggaaatcattcgccatccggcaggcttcttctaccgggccgtcgagaaacgcttgctcttcggcggtcaggcgcggctgcggatagttatgcagctttttccagtccggcttgccctggaacaagtcgccctcccaccaggtggtgcccgcatcaatcgcttctttctcagtgcggctcatcggcggcatcaccttacggaaaccgcgaaataccggcgcggaaatcatgctcttacgcataggcgcaaagttaaatggcacgaggataatggccagaggcaccagtacccacgcgctccacagaccagcaacgccgagggcggctgtccaggcgagcaaaatcagactgctgataaataagctcacgcggtgatagaacaacgcgccgagcaggacaaccgtagcgagaatactcaaaatcatcataacgaaaagccccttacttgtaggaggtctgaccacttgtgatgatatggttgtagtggatgtaaaaacatttagcaatatgtttacaatataattacaacaaagctcacattgttgctgtttttatccgcacttcaggtcaaaaagtcctggtcatagcacctgcccgtacttctcgcttttggcggtatccggtacactgcattttgtctattacatttatgctgaaggatatcctcatgtaccaggatcttattcgtaacgaactgaacgaagcggcggaaacgctggctaactttttaaaagatgacgccaatattcacgccattcagcgcgcggcggtcctgttagcagacagctttaaagccggtggcaaagtgctttcctgcggcaacggcggttcccattgcgacgctatgcactttgccgaagagttgaccggtcgctaccgtgaaaaccgtccgggctacccggcgattgctatttctgacgttagtcatatttcctgcgtcggtaatgatttcggtttcaatgatattttctcccgctacgttgaagcggtaggtcgcgaaggcgatgtactgctggggatctccacctccggtaactctgcaaacgtgatcaaagcgatcgcagcggcgcgtgagaagggaatgaaagtgatcaccctgaccggtaaagacggcggcaaaatggctggcacggcggatatcgaaattcgcgtaccgcactttggttatgccgaccgcattcaggagattcacattaaagtgatccatatcctgatccagttgattgaaaaagagatggttaagtaagtctggcgtaggccggataagacgtttacgccgcatccggcatttgtgcgctgatgcctgatgcgacgctgacgcgtcttatcatgcctacaaatctgtacgcgaaccgtaggccgaataatgcgttcacgccgcatccgacctgaaaattcttaaatcaatcttcgccgggggccatgcgctcccgctgttgtggaggttacccatgtgcgaattgctcgggatgagcgccaacgtccctaccgatatctgctttagtttcaccgggcttgtacagcgtggtggtggaaccgggccacataaagatggctggggcattaccttttacgaaggtaaaggctgtcgcacatttaaagatccacaacccagctttaattcccccatcgccaaacttgtccaggactacccgataaaatcctgtagcgtggtggctcatattcgccaggctaatcggggcgaggtggcgctggaaaatactcacccatttacccgcgagttatgggggcgtaactggacttatgcccataacggacaactgacgggctacaaaagtctggaaaccggcaacttccgcccggtaggcgaaaccgacagcgaaaaagccttctgctggctcctgcataaattaacgcagcgttacccgcgcacaccgggcaacatggcggcggtatttaaatatatcgccagtctggcggatgaactgcggcagaagggcgttttcaacatgctgcttagcgacgggcgctatgtaatggcgtattgcagcactaatttacactggatcacccgccgcgcgccgtttggcgtggcaacgttgctggatcaggatgtggaaatcgacttcagcagccagaccacaccgaatgatgtggtcacggtgattgcaacacagccgctgacgggcaatgaaacctggcaaaagattatgccaggcgaatggcgcttattttgcctcggggagcgtgtagtttgattattttgcctcggggagcgtgtagttacttgccagttgtggctgcacaacttcgtggcttaacggcttgctgaccacgtaacgaccattgaccacagaaacggttggtggcttacgggtttgctcaaagtagtcgtaacccggcttcagttgctcccagaagtccttaaagttggaatatttatggcgcttcatattggcgtcggtcatgcggaacgggtaaatactcacttgcacgctcggctgaccaaacaccagcgcaccagtaacgaactggaatatctcatcaataccctgattggtcattgcgtagcagccgatggaaacacaatcgccgtggatcatcaggtatttcccttcataaccatgcgcacggtcataggcattggggaaaccaatattaatcgctttgtagtaacggctgtctggttttaactgattacgctggacgctataaaacccttccgggcttttgaaatcgccctgacgctgttttggccctaagccgccggaatatttacagattttatagctgtcgagcagttgatattgctcgcccattttgacgtagagatcgagcgtacgttcttccttgaagatctggatgtagacaggggatcccatcaactgctgcttatactctttgctcacaggcgtggtagagctactgctgcccagcaaaccggcaaaactaacgcacgggatcaacaacatcgcaagaattaatgcgattttacgcatactgcttattccttgataaaacggttacacacgccaggacggcaaaatggatcccaaatcggaatagtctggatttggaaggctcacattatcaccaaaagagttttacgcaagcctgtcggcgcagggtttacaaatttcatcggaagcgggctttacccaaagagcgccgcgtgagttccagttctctcaaatcgtaaaagtttatcggtaagtttgtaaatcaggatccagtccggttcgacatgagcatcgcgataacctttccaactaccttgcagcgggtggtctttataaacagctggaagcggtaaagtattattgataagaagcgtcataagatatttcaatttattcatatccttatgacgcttttgtgcaagttttacatccttactatattgtccgctgtattcaatatccctttgaatcatatttaaattcctaatttatcaaataaatcatcggcgtctttggccttatgaacatcaatgccagcttcgctgtttttgatactttgaatggttaattgattaggctcgcgtaaatcaaacggcaatgccttttcacgcgcgacctttgtgagggttatgcgaaccaggtcagagatggtcagccccatcccggccagtacgtccgctgcctgattcttcagatcttcatcgattcgggcgcgaacaaacgcgttagcagccattggggtatctcctgtgctgtatatttattcagcttgaattgtagctcaaatgagcaacagcgacaatccatgagtaatttaataaacggatgtttttacataattaactgaaatatatatgttaattttataataatggtttattaagtttgttcagaaacgatccgggatacactgcaacattaaagcatgaccagccattattgagtatgtccttgccgagcattccatcctttgtattgagcggattactgttgatttgtttgccgttttctagttttgccagcgccaccacaagtcatatctctttcagctacgccgcccgccagcggatgcaaaaccgtgcgcgtttattaaaacagtaccaaactcatctgaaaaagcaggccagctatattgtggaaggcaatgccgaaagcaaaagggcgctacgccagcacaaccgggagcagataaaacagcatccagaatggtttcctgctccgctcaaggcgagtgacagacgctggcaggcgctggcggaaaacaaccactttttaagcagcgaccatctgcataacattaccgaagtggcgattcaccgcctggagcagcagcttggcaagccttacgtctggggcggtacgcggcctgataaaggctttgactgtagcgggttggttttttatgcctacaacaagatccttgaggctaagctcccgcgcacggccaatgagatgtaccactatcgccgggcaacgattgtggcgaacaacgacctgcgccggggagatttgctgtttttccatatccacagccgcgagatagccgatcatatgggcgtgtatttgggcgatgggcaatttatcgagagcccacgtaccggcgaaaccattcggataagccgattagccgaacctttctggcaggaccattttttgggcgcgcgcaggattttgacggaagagacgattttgtaagacggataaggcgtttacgccgcatccggcagttgtacgcaggtgcctgatgcgacgctggcgcgtcttatcatgcctacgagcccgcgaatatttgcgagccgctttcccgatataaaacaacctcattgccaacctttccttttcttcttaccgttgagaaaaaggagtcgccatgtctgaatatcgtcgttattacatcaaggggggaacatggtttttcacggtgaatttacgaaatcgtcgaagccaacttttgaccacccagtaccagatgctccgtcacgccattattaaagttaagcgagacaggccttttgaaatcaacgcctgggtcgttttgccagagcatatgcactgtatctggacattacctgaaggcgatgatgatttttccagccgctggcgggaaattaaaaagcaatttacccatgcttgtggattgaaaaatatctggcaaccacgtttttgggagcacgccatccgcaataccaaagattataggcatcatgttgattatatttatataaatccagtaaagcatggttgggtaaagcaagtgagtgattggccattcagtacgttccatcgcgatgtcgcgcgagggttatatcccatcgattgggcgggggacgtaacggattttagtgccggggagcgtatcattagttaattgtgcgcagatgcctgatgcgacgctagcgcgtcttatcatgcctacaaacttgtgccggatcggtaggccggataaggcgtttatgccgcatccggcagttatgcgcagatgcctgatgcgacgctggcgcgtcttatcatgcctacaaacttgtgcctgaacggtaggacggataaggcgttcacgccgcatccggcagttgtgcaccaatgctggatacttacatcaacgcccccataatcttcaactccagctcatccggcacttcgttatacgacagcacatgcagccccggcgcaaacaaccttgcataacgcgccagcaaagggcgcagctgcggtggcaccagcagcaccgggtctttccccgccgctttcatctgctctttcacctgtggcatcgtactctggaactggttgagcatattcggatcgaccggcacgctgtcgagcatcactttcccgccctgttgcgcctgattcaccacgttggtcagcagattttccagctcattattcagcgtatacaccgtcagctcctgcttgcgaacgaacggatgggtaatgctgcgccgcaatgccaggcgcacatcggccgccagcagaatatgatctttcgtcaccgtgctactggcgaccagcacggtggcgatggtgacgatatcgcgcagggaaacgccttcggtcagcagcgcccggtacactttcagcaactggctgtaattgagcgccgcgctcaaatcttccgccagacgcggtgccgtcgacgataaacggttatgcaactgcgtaatatcatcatagttaaacaaatcaggaatatagctgcgcacaatcttatttacatgggtagcgatcacgctggcgctgtcgatcacctgataccccatattcagcgccttcgctttctgcgccgcctggatccaggtgaccggcatcccgtacgccgggtcgttcccctgcacgccgtcaatctcgccgtaggtttcgctggagggcagggccatcagtttatccgccggaatatccgcttcatcagcctttatgccgttgatgaaaatggcgtactgactgggcttaaggcggaagttttcccgaatgcggatctccggcagcagcacgccgttgccgtcagaaatcacctgccgcacgccgcgaatccgctgggtgagcgggttaccctgtgctttgtccaccagcgccaccagtttgtaaccgaggcttaaactgataggctcgatcagcggaatggtttcccaactgacctgctgctcgctggtttcggtgatggtgcgggtcagcgtttcgaggcttttctcttccgcctccgccgccagcggctgtttgctcatccgccagccggtaaaaccaagcagggcgctgaacagcaaaaacggcaggtgcggcattcccggtaccaccgccagcacgaacataatcccggtggcggtgtagagcaccgacgggcttgccagcagctggttacgcacgtcatgggcgatatcgccgttgtcgctgacgcgggtgacgataatcgccgccgcggtggagagcagcagggaagggatctgcgccaccaggccgtcgccgatggtcatcagcacatactgctggaaggcagcatcggcgctcaggttgtatttgaagatcccgatacagacgccgccgatcaggttgatcgccagaatcatcatcccggcgatggcgtccccgcgcacaaacttcgatgccccgtccatcgcgccgtagaaatcggcctcgctggcaacatctttacgccgggtttgcgcctgcgcctggttgatcaatccggcgttaagatcggcgtcaatcgccatctgtttgccgggcatcgcgtctaaggtaaagcgggcagaaacctcggaaatacgctcggcccctttggtgacgacaataaagttgattgtcaacagcgtcagtaaatccgagcgtgaaagcattatcgccgcgctgcacgggcagtcgatttttaacggtggtgggctgtcgccgttaaataaaatcagcccgtctcatccgccaaaacctgccaccgtggcggtgccggaagagacggagaaaaaagcgcgtgatgtgaatgagaaaacggcgctgctgaagaagaaatccgccaccgagcttggtgagctggcaaccagtatcaacaccattgcccgtgatgcgcatatggaagcgaatctggagatggagattgttccccagggattacgcgtgctgattaaagacgaccagaaccgcgatatgtttgaacgcggcagcgcgaagattatgccgttctttaaaacgctgctggtggagctcgcgccagtgttcgactcgctcgataataaaattattattaccgggcataccgatgcgatggcctacaaaaacaatatctacaacaactggaacctttcgggtgaccgcgcgctttcggctcgtcgggtgctggaagaggccggaatgccggaagataaagtgatgcaggtaagcgcaatggcggaccagatgctgctggattccaaaaatccgcaaagcgcgggcaaccggcgcattgagattatggtgctgaccaaaagtgcgtccgatacgctgtatcaatactttggtcagcatggggataaagtggtgcagccgctggtgcaaaagctggataagcagcaggtgctttcgcagcgaacgcgttaaatgctgaatctttacgcatttctcaaaccctgaaatcactgtatactttaccagtgttgagaggtgagcaatgcgtaaaatcattcatgtggatatggactgctttttcgccgcagtggagatgcgcgacaatcccgccctgcgcgatatccctattgctattggcggcagccgcgaacgtcgggggggtgatcagcaccgccaattatcccgcgcgtaaatttggcgtacgtagcgctatgccgacagggatggcgctcaaattatgcccacatctcaccttgcttccggggcgctttgacgcctacaaagaagccagtaatcatatccgtgaaatcttcagccgctacaccagccgcattgaaccgttgagtctggatgaggcttatctcgatgtcaccgatagcgtccattgccacggttctgcgaccctcatcgcccaggaaatccgccagacaatcttcaacgagctgcaactgacggcgtctgcgggcgtggcaccagtaaagtttctcgccaaaatcgcctccgacatgaataaacccaacggccagtttgtgattacgccggcagaagttccggcatttttacaaaccttaccgctggcaaaaatccccggcgtcggcaaagtcagtgcggcaaaactggaagcgatggggctgcggacctgcggtgatgtacaaaagtgtgatctggtgatgctgcttaaacgctttggcaaatttggccgcattttgtgggagcgtagtcaggggattgacgaacgcgatgttaacagcgaacggttgcgaaaatccgtcggcgtggaacgcacgatggcggaagatattcatcactggtctgaatgtgaagcgattatcgagcggctgtatccggaacttgaacgccgtctggcaaaggtaaaacctgatttactgattgctcgccagggggtgaaattaaagttcgacgattttcagcaaaccacccaggagcacgtctggccgcggctgaataaagctgatctaatcgccaccgcgcgtaaaacctgggatgaacgccgcggcgggcgcggtgtgcgtctggtggggctgcatgtgacgttgcttgacccgcaaatggaaagacaactggtgctgggattatgatgtatactattatgtatattctggtgtgcattattatgagggtatcactgtatgcatcgaattctcgctgaaaaaagcgtcaatatcactgagttacgtaaaaacccagctaaatactttattgatcaaccggttgcggttctttctaataatcgccccgcaggatatctcttaagtgccagcgcattcgaagcgttaatggacatgcttgctgaacaagaggagaaaaagcccataaaggcgcgcttccgtccaagtgctgcaagattagaggaaattacacgccgcgctgaacaatatcttaatgatatgacggatgatgatttcaatgactttaaggaataaggatgcgggtattcaaaacaaaacttattcgcctgcaacttacagcagaggaacttgatgcgttaacggcggattttatttcctataagcgtgacggtgttttgccagatatatttggtcgcgatgcactctacgacgactcctttacctggccattaatcaaatttgagcgagttgctcatattcatctggcaaatgagaataatccatttccgccacagttgcgccaattcagcagaacgaatgacgaagcgcatttggtatattgtcagggggcgtttgatgagcaagcatggttgctcattgccattctgaaacctgaacctcataaactggctcgagataacaaccaaatgcataaaattgggaaaatggcagaagcgtttcgcatgcgtttttgaatttatattatgaataacatacaaataagaaactatcagcctggcgattttcagcaactatgcgctattttcattagagcggttacgatgaccgccagtcagcattatagtccacaacaaatttccgcctgggcgcagattgacgaatctcgctggaaggagaaactcgcgaaaagtcaagtgtgggttgcgatcattaatgcacaaccggttggttttatttcccgcattgaacattatatcgatatgttatttgttgaccctgaatacacccgccgtggggttgccagcgctttgttaaaacctttgattaagtctgaatccgaacttacggtggacgcaagcataaccgcaaaacccttttttgaacgttatggttttcagacagttaagcagcagcgcgttgaatgccggggagcgtggtttactaatttttatatgcgatataaaccgcaacattaaatccagcttgcaatgaaaataacgcccgcctggtatgtgcgcgttttctgattccacaaactgcaaggaggtaaatcatgacaaatcctttatcaatgactctttgcagacctttccaggattaattctttttttcttgccctggattcgtctgccatttcctgatttttatatttatatactctaaataattcgagttgcaggaaggcgacaagcgagtgaatcgccaggagcttacataagtaagtgactggggtgaacgaacgcagtcgcagtacatgcaacttgaagtatgacgagtataaatggaatggtacatgggcaaatatattcgtcccttatccgatgcggtatttaccatcgcatctgatgacctgtggatcgagagtttagcgatccaacaattacacaccacggcaaatttacccaacatgcagcgcgtagtggggatgccagatttacaccccggacgcggctacccgattggcgcagcgttcttctctgttggtcgtttttacccggcaagacgtcgcggtaacggtgctggaaacagaaacgggccgctactctgacacactgcgtagcgcgctggtttctctcgatggcgataacgcatgggcattaagcgaaagctggtgtggcactattcagtggatttgtccgagtccgtatcggcctcatcatgggcgcaaaaactggtttctgggcattgggcgttttaccgctgatgagcaggaacaaagcgatgcaatccgttatgagacgctgcgtagcagcgggccgggcggtcaacatgtcaataaaaccgacagcgcggtacgcgccacgcatttggcatccggtattagcgtgaaggttcagagtgagcgtagtcagcatgctaacaagcggctggcacgattgctgattgcctggaagctggagcaacagcaacaggaaaatagcgcggcgctgaaaagccagcggcgaatgttccatcaccagattgaacgtggcaacccgcgacggacatttacagggatggcttttatcgaaggataatgaaggatgaaactgccggaaggcgattaaacgccatccggcagcaaatcaaataattacttcgccggaatttctttcagcagttcagtcagcagtgtccagtaatgacctacgctttcgatgtgaacttgctcatccggagagtgtggaccggtgatagttggcccgatagaaaccatgtccatttccggatacggttttttgaacagaccacattccaggcccgcgtggataatctggatgttcggcgtcttgttgaacaggcgctgataggtttcacgtaccagatgcatcaccggagaattagcgtccggctgccagccaggatatgcgcctttcgcttcggttttcgcgccagccagtttacccaggctatccagcatgctcaccacgtagtctttaccgctgtcgatcagactacggatcaggcagtgaatttctacgttattgtcagtcatggtcaccacaccgacgttcagggaggtttcaaccacacctttggctacatcggagttacgaatcacaccgttcggggtggcgttcagcagacgaataaaggtatcgcgagatttcgcaatcagggcagctttatcgttcgctacagagtccagcaacaaggccagatttttctctttttctgccagctcgtttttcaggatctcctgataggtattcaccagagatttcaggacgtcgactttatcagctgcgacagcaatggtcgcaaaggcttcacgcgggatggcgttacgcagtgtgccgccgttgaaatcgataaggcgcagatccagttcttccgcatgacccgccaggaagcgcaccagcagtttgttggcattacccagcccaacgtggatttccccgccggagtgaccgcctttcagaccttttaaggttaacttgaaggtttcaaaaccagctggaaccgcttcacgatctaaatgcaggttggaggtgaagtcgataccccccgcacaacccatgtagatttcaccttcttcttcggagtcggtgttaatcagaatatcagcctgcaaccagttgccctgtaagccgaacgcaccgtccataccggcttcttcggtcatggtcagcagcacttccagcgggccgtgaaccacgttttcgtcagccagaaccgccagcgcagaggccataccaatgccgttatccgcacccagcgtggtgccgcgcgctttaacccattcgccatcaatataaggctggataggatctttcgtgaagtcatgcacggtgtcgttatttttctgcggcaccatatcgaggtgggcctgtaagacgaccggtttacgattttccatacctgcggtagcaggtttacgaatcaggatattacctacctgatcgcgttcgacatggaaacctttctcttttgcccaaccaacaatgtattcagcgagttgctcttcatgataggacgggtgaggaatagaacagattttggcaaaaatatcccacagcggctgtggagataattgagacagttcagacacgttaagtctccttgtcgatcacccgcaaaacagtattgcaggtcacagggttagcagaaaatgttgtcaacacaagacaggcttgcgagatatgtttgagaataccactttatcccgcgtcagggagaggcagtgcgtaaaaagacgcggactcatgtgaaatactggtttttagtgcgccagatctctataatctcgcgcaacctattttcccctcgaacactttttaagccgtagataaacaggctgggacacttcacatgagcgaaaaatacatcgtcacctgggacatgttgcagatccatgcacgtaaactcgcaagccgactgatgccttctgaacaatggaaaggcattattgccgtaagccgtggcggtctggtaccgggtgcgttactggcgcgtgaactgggtattcgtcatgtcgataccgtttgtatttccagctacgatcacgacaaccagcgcgagcttaaagtgctgaaacgcgcagaaggcgatggcgaaggcttcatcgttattgatgacctggtggataccggtggtactgcggttgcgattcgtgaaatgtatccaaaagcgcactttgtcaccatcttcgcaaaaccggctggtcgtccgctggttgatgactatgttgttgatatcccgcaagatacctggattgaacagccgtgggatatgggcgtcgtattcgtcccgccaatctccggtcgctaatcttttcaacgcctggcactgccgggcgttgttctttttaacttcaggcgggttacaatagtttccagtaagtattctggaggctgcatccatgacacaggcaaacctgagcgaaaccctgttcaaaccccgctttaaacatcctgaaaccagcacgctagtccgccgctttaatcacggcgcacaaccgcctgtgcagagcgcccttgatggtaaaaccatccctcactggtatcgcatgattaaccgtctgatgtggatctggcgcggcattgacccacgcgaaatcctcgacgtccaggcacgtattgtgatgagcgatgccgaacgtaccgacgatgatttatacgatacggtgattggctaccgtggcggcaactggatttatgagtgggccacccaggcgatggtgtggcaacaaaaagcctgtgcggaagacgatccgcaactcagtggtcgtcactggctgcatgcggctacgttgtacaacattgccgcctatcctcatctgaaaggagatgacctggccgagcaagcgcaggctttgagtaaccgcgcctatgaagaggccgctcagcgtctaccgggcacgatgcggcagatggagtttaccgtacccggcggtgcgcccatcaccggctttttgcatatgccgaaaggcgatggcccgttcccgacggtattaatgtgtggtggtctggatgcgatgcagacggactattacagcctgtatgaacgttattttgcgccgcgcggcattgcgatgctgactattgatatgccgagcgtgggcttttctagtaaatggaagctcacccaggactccagcctgttgcatcagcacgtcttaaaggcgctgcctaacgtaccgtgggtggatcacactcgcgtcgcggcctttggtttccgtttcggcgctaacgttgccgtgcgtctggcataccttgaaagcccgcgtctgaaagcggttgcctgtcttggtccggtagttcataccctgttgagtgattttaagtgccagcaacaggtgccggaaatgtatcttgacgttctggccagtcgtttggggatgcatgatgcttccgatgaagcgttgcgcgtggagctgaatcgctatagtttaaaagtgcaaggattgctgggacgtcgctgcccaacgccaatgttaagtggctactggaagaacgatccgttcagcccggaagaggacagtcgcttaatcaccagtagttctgctgacggtaaattattagagatcccatttaacccggtgtatcggaattttgacaaaggtcttcaggaaatcaccgactggatcgaaaaacgcttgtgttaaaaatttgctaaattttgccaatctggtaaaacagttgcatcacaacaggagatagcaatgacgttaccgagtggacacccgaagagcagattgatcaaaaaatttaccgcactaggcccgtatattcgtgaaggtaagtgcaaagataatcgattctttttcgattgtctggctgtatgcgtcaacgtgaaaccggcaccggaagtgcgtgaattctggggctggtggatggagctggaagcgcaggaatcccgttttacctacagttaccagtttggtctgttcgataaagcaggcgactggaagagtgttccggtaaaagacactgaagtggttgaacgactggagcacaccctgcgtgagtttcacgagaagctgcgtgaactgctgacgacgctgaatctgaagctggaaccggcggatgattttcgtgacgagccggtgaagttaacggcgtgagtgaaatgtgccggatgcatcacatccggcaatattcattaaaactgatacgtcatgccaaccgcgacaatatcatcattattaatattcaatttgttatcgctatccagttggttgattttataatcaacaaacgcactcatatttttgttgaaataatacgtagcaccgacgtcgatataattgaccagatcttcatcaccgataccttcaatatctttccctttgcttaagacataacccaggcttggacgcagaccaaagtcaaactggtattgagcgaccgcttcaaagttctgtgtcttattggcaaagccgccagttattggcgtcattttgcgtgtttcagaatagaaagttgccagataaatattattggcatcgtatttcagacctgttgcccatgcttctgcacgcttgcctgtgccacggctttgcaggttctgctcgttggtgcgatcactgttggtataggccccactaatggcgaaatcgctgccgccaaagtcatatgtcaaactcgtgccgaagccatcgccgttttgctttttaacgtcgcggttttcgtttttcccttgatattgcagggttaagttcaggccatcgataacgccgaagaagtcggtgttccgatacgtcgccagaccgctggcgcgtttggtcataaagttgtcggtctgcgcgctggaatcgccaccaaattccgggaacatatcggtccaggcttccacgtcatacaacgcccccaggttacgaccataatcgaaagaacccaaatctttatatttcaacccggcaaaagcgagacgcgttttttgctgtgcagtatcactctctgctttattaccggcaaactctgcttcccaacgaccataaccagtcagttgatcgttaatttgtgtttcgcctttgaaaccaaaacggatataactctggtcgccatctttactggcgttatcactcatataatgcatggctttaactttgccatagacatccagtttattaccgtctttattatatatttctgcagcctgtacagatgcagatgccacaatgcccatcaccactaatgccagagtgctctttttcattttcattcctgattttaattaacgcgcgaatattcagcgggagagtcccgttgaaaacaggaaagtttttaacctgagattgttaaagatatattacagattaataatattcttaaaatgtggtaatttattaaatctgtaataaaagcgtaaacaactgccgctaggcttgctgatcccgcgcaacaaaacgccatgctttgctcgcagatggttggcaaccgacgacagtcctgctaaaacgttcgtttgatatcatttttcctaaaattgaatggcagagaatcatgagtgacagccagacgctggtggtaaaactcggcaccagtgtgctaacaggcggaagccgccgtctgaaccgtgcccatatcgttgaacttgttcgccagtgcgcgcagttacatgccgccgggcatcggattgttattgtgacgagcggcgcgatcgccgccggacgtgagcacctgggttacccggaactgccagcgaccatcgccagcaaacaactgctggcggcggtagggcagagtcgactgattcaactgtgggaacagctgtttagcatttatggcattcacgtcgggcaaatgctgctgacccgtgctgatatggaagaccgtgaacgcttcctgaacgcccgcgacaccctgcgagcgttgctcgataacaatatcgttccggtaatcaatgagaacgatgctgtcgctacggcagagattaaggtcggcgataacgataacctttctgcgctggcggcgattcttgcgggtgccgataaactgttgctgctgaccgatcaaaaaggtttgtataccgctgacccgcgcagcaatccgcaggcagaactgattaaagatgtttacggcattgatgacgcactgcgcgcgattgccggtgacagcgttagtggcctcggaactggcggcatgagtaccaaattgcaggccgctgacgtggcttgccgtgcgggtatcgacaccattattgccgcgggcagcaagccgggcgttattggtgatgtgatggaaggcatttccgtcggtacgctgttccatgcccaggcgactccgcttgaaaaccgtaaacgctggattttcggtgcgccgccggcgggtgaaatcacggtagatgaaggggcaactgccgccattctggaacgcggcagctccctgttgccgaaaggcattaaaagcgtgactggcaatttcagccgtggtgaagtcatccgcatttgcaacctcgaaggccgcgatatcgcccacggcgtcagtcgttacaacagcgatgcattacgccgtattgccggacaccacagccaagaaattgatgcaatactgggatatgaatacggcccggttgccgttcaccgtgatgacatgattacccgttaaggagcaggctgatgctggaacaaatgggcattgccgcgaagcaagccagctataaattagcgcaactctccagccgcgaaaaaaatcgcgtgctggaaaaaatcgccgatgaactggaagcacaaagcgaaatcatcctcaacgctaacgcccaggatgttgctgacgcgcgagccaatggccttagcgaagcgatgcttgaccgtctggcactgacgcccgcacggctgaaaggcattgccgacgatgtacgtcaggtgtgcaacctcgccgatccggtggggcaggtaatcgatggcggcgtactggacagcggcctgcgtcttgagcgtcgtcgcgtaccgctgggggttattggcgtgatttatgaagcgcgcccgaacgtgacggttgatgtcgctagcctgtgcctgaaaaccggtaatgcggtgatcctgcgcggtggcaaagaaacgtgtcgcactaacgctgcaacggtggcggtgattcaggacgccctgaaatcctgcggcttaccggcgggtgccgtgcaggcgattgataatcctgaccgtgcgctggtcagtgaaatgctgcgtatggataaatacatcgacatgctgatcccgcgtggtggcgctggtttgcataaactgtgccgtgaacagagcacaatcccggtgatcacaggtggtataggcgtatgccatatttacgttgatgaaagtgtagagatcgctgaagcattaaaagtgatcgtcaacgcgaaaactcagcgtccgagcacatgtaatacggttgaaacgttgctggtgaataaaaacatcgccgatagcttcctgcccgcattaagcaaacaaatggcggaaagcggcgtgacattacacgcagatgcagctgcactggcgcagttgcaggcaggccctgcgaaggtggttgctgttaaagccgaagagtatgacgatgagtttctgagtttagatttgaacgtcaaaatcgtcagcgatcttgacgatgccatcgcccatattcgtgaacacggcacacaacactccgatgcgatcctgacccgcgatatgcgcaacgcccagcgttttgttaatgaagtggatagctccgctgtttacgttaacgcctctacgcgttttaccgacggcggccagtttggtctgggtgcggaagtggcggtaagcacacaaaaactccacgcgcgtggcccaatggggctggaagcactgaccacttacaagtggatcggcattggtgattacaccattcgtgcgtaaataaaaccgggtgatgcaaaagtagccatttgattcacaaggccattgacgcatcgcccggttagttttaaccttgtccaccgtgattcacgttcgtgaacatgtcctttcagggccgatatagctcagttggtagagcagcgcattcgtaatgcgaaggtcgtaggttcgactcctattatcggcaccattaaaatcaaattgttacgtaagatcttatcattctcccaccaaaaaattatcttaatgtaacagctggtgtaagtaaattctatcaacgaagatcaatcttatctactgaccaaaaaggcctgatagggcttcgctcactatacatccttggctgcaggtttagttgtacaccactcctaaatttaatgtgttggcaatgtgttcaataaagctcgaacaaattagctcattatgatcggttaatacttcaacttctggttgcatgattgtttgtccgtaaaaagataacgcgcctgccgggtagtagcaggcgcattacgcaataggtaaacaagggaggaagttcagaaatgtaaatcgggaaggttgtacgcaatgttcatcgtactacgttgttacggctttgccgcaacaagccagttgcctgccgcgctcgcagaatgtctgcagcccggagataaggagattgttcctgccagctaaatcccttcctgtcgatacgaaccagctcgtatttttctaccagaaaattcacggcatcggctagggtgataccggcatcgatagtctgtatcaggaatgttcgggttaaatatcagcaaaaagcccgcatcatgaatactggatatgaagcatgagagttacctcagtgtttatataaggattcggtccccctctctggaacggtaactctcaatctgatcggttcctgcgttagttcacatcacgactcattttttcgctctcaccggcatcccatttgccacaaaatatcccgccgtgctcctcggcagcgcttcctgtccacgaatcatatccgctattttctcgccaatcataattgtcgtggcgttcaaattcccggtgataatctgcggcataatgctcgcatccaccacacgcaggccttctaacccgtgtacgcggccttcgccgtcaaccacggacatctcgtcgtaacccattttgcaggtaccgcacggatggaaggcggtttcggcgtggttacgcacgaactcatcgagctgttcatccgtctggcattcgacaccggggctgatttcgcggccacgatactgatccagcgcgggttgatgcatgatctcgcgggtgatgcgaattgcgtcgcggaactcctgccagtcctgctcgtggctcatgtagttaaacagaatcgccggatgctggtgcgggtcgcgggatttaatccgcacatgcccacggcttgggctgcgcatactgccgacgtggcactggaaaccgtgctctttcactgcattgctgccgttatagttaatcgctactggcaggaaatggtactgaatattcggccacgcaaattcctcacggctgcgaataaatccacctgcttcaaagtggttgctggcaccaacgccagtgccgccaaacagccactccgcaccgattttcggctggttccaccactgcagggcagggtagagggaaaccggttctttgcactcatattgcagatacatctccagatgatcctgaagattttcgccgacgccgggtaattcatgcaccagcggaatatcaaactccgccagcagttcagcgttgccgacgccggagcgttgcaggatctgcggactggcaatcgcgcctgcacataacagcacttctttgttggccgttgcgcgggttgggatggtgctgtcgccttccagccattcgacgcccaccgcgcgtttgccgtcaaaaatgatgtgatcggtcatagcgtgagtacgaatggtcaggttaggacggcttttggcctgatcgagatagccacgcgcggtgctggcgcgacggccctgcggcgtgacggtgcgatccatcggaccaaaaccttcctgctgataaccgttgagatcgtccgtgcgcgggtagcccgcctgcacgcccgcttcaatcatcgcttcaaacagcggattgacgccgggtttggaggtagtgacgctcaccgggccatcaccgccgtgatagtcgttttcacccatatcgcgagtctcggccttgcggtagtagggcaggcagtcgaggtagctccagttctccagaccgggttcttgcgcccagttatcgagatccagcgcattgccacggatgtagcacatgccgttgatcaggctgcttccacccagacctttaccgcgtccgcactccatgcggcggttattcataaacggttcaggttccgtttcataggcccagttgtagcgtttaccctgtagcgggaatgccagggcagcgggcatctgggtgcggaagtcaaagcgatagtccgggccgcccgcttcaagcagcagcacggaggtattcggatcttcagtcagacgggtagcgagaacgttgccggcactgccggcaccaataatgatgtagtcaaattgcaaataaacctcctggttagaatatggactggaatttagccatctcaacctggatggacttcacctgggtgtaactctggagcgtcatcacgccgttctcgcgaccaatgccggagtgtttgtagccgccaacgggcatctctgccggggattcgccccaggtgttgatccagcaaatacccgcttccagctgatgaatgacgcgatgcgcgcggttcaggtccgctgtcacgatgcccgccgccaggccgtagtcggtatcgttagcgcggcgaatgacttcgtcttcgctctcgtaggtcagaatggacatcactggcccgaagatctcttcacgcacgatggtcatatcgtcgctgcaatcggtgaacactgtcggtgcaacccatgcgccgttatcgaagccatcgcctttcagtacatcgccgccgcacagtacgcgcgcgccttcctctttgcctttggcgatatagcgcagcacgttatcgcgatgcgggaagctgaccagcgggccgaagttagtttgcggatcgaaaacgtcgcccgcgcgaatgcgctcaacgcgcgccagaattttctgctcaaatgcggctttgcatttcgccggaacgaagacgcgggtgccattggtacacacctgaccggagctgaagaagtttgccatcatggcgatatcggcggcgagatcgagatccgcatcatcgaaaacgatcagcggacttttaccgcccagttccatggtcacttctttcagggaagaggccgcgctgttagccatcacttttttgccgctggcgacaccgccggtaaaactcactttggcaatgcccggatgctcggtcagatattgcccggtctccgcgcccacgcccggcaacacgttaaatacgccgtccggcaggcccgcttcgctgtaaatttcagccagctttaacgcggtaagcggggtaacttcgctcggtttgaaaatcattgcgttgcctgccgccagcgccggggcggatttccacagggcaatctggatcgggtagttccatgcgccaatccctgccactacgcccagcggttcgcggcgggtatacacaaaggacgtttcacgcaacgggatctggctgccttccagcgccgggatcagcccggcgtagtactccagcacgtccgcaccggtaacgatatcgacggtactggtttcgctatatgcttttccggtgtcgagggtttccagttttgcgagttcgtcattgcgttcacgcagaatatcaacggcccgacgcagaatacggctgcgctccatggcggtcatgctcgcccagattttttgcccctgctgggcgcttttcacggcgcgatcgacatcctcgcgcccggcggcctgcacggtcgccagcacgttaccgttggccgggttaatggtctcgaaggtgcgaccgctggtggcggaggtataaccaccatgtatataaagctgctgttctgccattcgggacatcacgtctcctcggttaatcggtgggtagatgctgagtgataaagtggcgggtcagggaattagcgcgggttttatccagcggtttgccgctcagagccgcgcgcagccataatccatcaatcagcgcggccaggccgtagcccgcttcctgtgcctgttcgcgcggcaattcgcgacgaaactcgctcaccagattgctcagcaagcggcggctgctgacctgctgtaaacgatagagcatcggctgatgcatactgctggcccagaacgccagccaggctttcatcgccgcactgctcacctgcgtttcatcgaagtttccgccaacaatcgcctgtaatcgctgctctgcactgccctgcggaagtgcatgtaatcgattcaaaaccgcgtcacgcagctgactggtgatatcgcgcatggttgcttccagcagaccatttttgtccctgaaatagtggctgatgatccccgtagaaacgcctgcacggcgggcgatctgcgcgatcgttgcatcgtgcatgcccacttcatttattgcttccagtgtggcgtcgatcagttgtctgcgccggatgctctgcatccccaatttgggcattttcgccactccattcatcagcggtgtttatctattaaagcggttattgattggacgttcaatataaaatgtgtcttaattgttacgaatttgattttaaatagtaacaataacagtggggatactggatgacagaccttagtcacagcagggaaaaggacaaaatcaatccggtggtgttttacacctccgccggactgattttgttgttttccctgacaacgatcctgtttcgcgacttcagcgccctgtggattggccgcacgctggactgggtttctaaaaccttcggttggtactatctgctggcggcaacgctctatattgtctttgtggtctgtatcgcttgtagccgttttggtagcgtgaagctcgggccagaacaatccaaaccggaattcagcctgctgagttgggcggcgatgctgtttgctgccgggatcggtatcgacctgatgttcttctccgtagccgaaccggtaacgcagtatatgcagccgccggaaggcgcgggacagacgattgaggccgcgcgtcaggcgatggtctggacgctgtttcactacggcttaaccggctggagcatgtatgcgctgatgggcatggcgctcggatactttagctatcgttataatttgccgctcaccatccgcagcgcgctgtacccgatcttcggtaaacggattaacgggccgataggtcacagtgtggatattgcagcggtgatcggcactatcttcggtattgccactacgctcggtatcggtgtggtgcagcttaactatggcttgagcgtactgtttgatattcccgatagcatggcggcgaaagcggcactgatcgccttgagcgtgataatcgccacgatctctgtcacctccggtgtcgataagggcattcgcgtgttaagcgagcttaatgtcgcgctggcgctgggattgatcctgttcgtattgtttatgggcgacactagcttcctgcttaatgcactggtgctgaatgttggcgactatgtgaatcgctttatgggcatgacgctcaacagttttgccttcgaccgtccggttgagtggatgaataactggacgctcttcttctgggcatggtgggtggcatggagcccgtttgtcggcttgttcctggcgcgtatcagccgtgggcgtaccattcgccagttcgtgctgggcacgttgattattccgtttaccttcacgctgttatggctcagcgtgttcggcaatagcgcgctgtatgaaatcatccacggcggcgcggcatttgccgaggaagcgatggtccatccggagcgcggcttctacagcctgctggcgcagtatccggcgtttacctttagcgcctccgtcgccaccattactggcctgctgttttatgtgaccagcgcggactccggggcgctggtgctggggaatttcaccagccagcttaaagatatcaacagcgacgcccccggctggctgcgcgtcttctggagcgtggcgattggcctgctgacgctcggcatgctgatgactaacgggatatccgcgctgcaaaacaccacggtgattatggggctgccgttcagctttgtgatcttcttcgtgatggcggggttgtataaatctctgaaggtagaagattaccgccgtgaaagtgccaaccgcgataccgcaccgcgaccgctggggcttcaggatcgcctgagctggaaaaaacgtctcagccgcctgatgaattatccgggcacgcgttacactaaacagatgatggagacggtctgttacccggcaatggaagaagtggcgcaggagttgcggttgcgcggcgcgtacgtggagctaaaaagcctgccaccggaagagggacagcagttgggtcatctggatttgttggtgcatatgggcgaagagcaaaactttgtctatcagatttggccgcagcaatatagcgtgccgggctttacctaccgcgcacgcagcggtaaaagcacctactaccggctggaaaccttcctgttagaaggcagccagggcaacgacctgatggactacagcaaagagcaggtgatcaccgatattcttgaccagtacgagcggcaccttaactttattcatctccatcgtgaagcgccgggccatagcgtgatgttcccggacgcgtgattgttattgcataaaaccgcgccatgtctgcatatggcgctgtttctcctacctcttgatacgttatatctatacggttaagcccttagtatctattgatgattaccagacaacagataataaaaaagaaaagaactattgcagcccaaaacctacatttgggctgttgcgaatgttcaataagtttagtcttatttaatgtaaatattgctgatcatttgaaatgacgcattattcatgagaaatgtgtatcgtaaatcaactgaaattaacgcaaccatttgttatttaaggtttaattatctgtgtgtgatattttattgaatgttttaaatattgtttttattggcattgctataatattggttatcatttgctgaatggattcagtcttaatgagtgggtttttaagggacaggcatagagtaatgatacgtatgcataaccaacatctttactcattatgtcattgaatgttgacgctatgtgtttatgagggagaggtattttcagttgatctggattgttaaattcatataatgcgcctttgctcatgaatggatgccagtatgtagtgggaaattataaatattgaaatagtccaactacttctttattaccaaaaatgagtatctgaattttaatattgcattcttgcgtgattatctcctgagtttgacttgtgattacctttttaaggtatttagcgtaactgtttttgagcgagcatcagaggtaaagataatcttcttgatagtgatgtgggatgttatacgtatggcatcgctgatgtttatggttaccccttatgtgtgctcaggaatcgacaggtaatcactcatactgaacagcgataaaagataaaggtgtgttcatgaatagttgtgattttcgtgtttttctgcaagagttcggtacaacggttcatttgagtttgcctggtagcgtatccgagaaagaacgactgctactcaagctgctgatgcagggaatgtctgtaacagaaataagtcagtacagaaatcgcagtgcaaagacaattagtcatcaaaagaaacagctctttgagaaactggggattcagagcgatattactttctggcgcgatattttctttcagtacaatccggagatcatatccgccacggggagtaatagtcacagatatattaatgataatcactatcaccatatcgtcacgcctgaagccatcagtctggcgttggaaaaccacgaattcaaaccgtggatccaaccggttttctgcgcgcagactggcgtactgacgggctgtgaggtgcttgtccgctgggaacatccacaaacgggaattatcccaccggatcagtttattcctctggcggagagttccggtcttattgtcataatgacccgccaactgatgaaacagactgcggatattctgatgccggtaaaacatttgctgccggacaatttccatattggcatcaacgtcagcgcgggttgttttttggcagcgggatttgaaaaagagtgtctgaacctggttaataaattaggtaacgataaaatcaagctggttctcgagctaacggaacgtaaccctattccggtaacgccagaagccagagcgatatttgacagccttcatcagcacaacattacctttgcgctggatgactttggtacgggttatgcgacctatcgttacttgcaggcgttcccggtcgattttattaagatcgataagagttttgtgcaaatggcgagtgtcgacgaaatctccggtcatattgtggacaatattgtcgaactagcgcgtaagcctggtctgagtatcgtggcggaaggggtagaaacccaggagcaggcggatttaatgatcggtaaaggcgttcactttttgcagggctatttgtactctccgccagtaccgggtaataaatttatctctgaatgggtaatgaaagcaggtggttgatgtaaaccgctattcacagcgcatcgggaggttggcagcgattaattctcccgatgcagtaaatcctgatagatccccgttaatatgccatttggcgcaaattgttttttaatccactgcgtcacctgacccgtagcagaatgctgagtcgccagtaacatgcggctatcctggcgcggattatggatttgtcgggtaaccagcagggattgcgtcatcgcctcacggaccatgtaatccggcaaaaaaccaattccttcacctaaaatctggcactgacatttggtgttgaaatctggcaccagaatactctcctgcccgtgcagcaaccagcccacttttttattaatcgtatgcgcggtgtcctccaccataatattagggtagagacgcagttggctttcggcgatgggttccggcacaaaggctaacgggtgatccggggcgatagcaaaagcccagcgaatcgcgccaatttcagtgtaatcaataccgccgccgtccagtagtgtatcgggtgcgccgatggcgatattggcctgattattaataatcgcatcccagacgccgttatacacttcggtggtgacggtaatctggcaggtaggaaactgctttttcagcacctgtaacaagcgtgcggtgtgtttgggcgtataaagcagctgattaatacaaatgcgcacacgcgcttctatgccctggctaatagtatcgattctgcgtttgatggcataaaaatcattcagcaggtcggtagctttgcggaaaaaataacgcccggactccgttaactcaatgctgcgggtactgcgagtgaacagcaccacatccagccccgtctccatacgcttaatggtgtagctaatggcggaagtggttaaacccaactcttctgcggctttactgaagctgccaaaacgcgcagcggtagtaaatgccaacagattctcttcggtaaaaatactgttcattaaaccattctcgccattatctactatgaatttctccagctatgactgtagaggtatcggttaaagatagataatcatttttgaataacttttaatacccgtcgcgtttagtcgtcgcttcgcttaatttttgtccaccatattcactaattacccccacgcagttacccgccagaaaacccagtaacgtcaccgtccagttcatcccgctggcaaaaaacagcgtcatgccgagaaagccaccgggaataaaggacagtaaccagaaacgcccttgccagaccactaccgcgctgaagggtacggtagtaattacgctcgcccagaacgcggacagtccacttacagaggccagccaaccagcagtcagcgcggcgaaaaacgcccacaccatcccggaataattaaccgccagacttctgataaacccgcttttaccgccgcctgcggcataaaaactgcaaaaggcgacgaagccaatggttcctaataattcccatccttgagagagcccgacatgactagacactaactgccaaagccctgcacaaataccgacggtgacacccgttgccgtgagtccgttcatcttgttcccctctggttagacatggacgaaagctactcttacatgtgcagactatagagaaataaaacctgattgagtgaaagggtatcgggtcaaagaaacaaatattgcactaccgcacactgcgaaaagattgttgaatattattcaacaaaaaggcgagatacggcgaattaaatttaagcgggttcttttatcagattatcgttgctattctcaattcatcgaaaacagccacaaaaaccaggggaatgtgaatgagtataaaaaatctacctgccgactatttattggctgcacaacagggtgatatcgataaagtaaaaacctgccttgcgctgggtgtcgatattaatacctgcgatcgtcaggggaaaacggcaattacgctggcaagtttatatcagcaatatgcttgcgttcaggcattaattgatgccggagcggatattaataagcaagattatacctgtttaaatccttttttaattagctgtctgaacgatgatttaacgctactacgaattattttaccggctaaacccgatcttaattgcgtaacccgttttggcggtgtcggcctgacgcctgcctgtgaaaaaggccatttaagtattgtaaaagagcttttggcgcatacggagattaacgttaaccagaccaaccatgtaggctggacgccgctactggaagcgattgtgcttaatgatggtggtattaaacagcaggcgattgtgcagttattgctggaacacggtgccagcccgcatctgaccgataaatatggcaaaacgccactggaactggcgcgggaacggggctttgaagagattgcgcagttactgattgccgcaggtgcataaaccgggaggcttgctatcaacacaccagaaagacggtgtgtgtgggcgctaactgcggatgcggattttctggcgcagcgggggcaaggacaggttgaacaggtctttgccagagcggtaaatatcgcactcccggctcgccagcagttgctgacgctgctttgtgaagagtacgacaatgcgccaaacagttgtcggttggcactcactcactttgatgatctgttccggcatggtgataaggttcagtttgacgatcaaggtattacggttggtcaacatcttcatatagagatgagtcgttgtcggcgttggctgtccccaaccttgcaaatgaccgctgtgaattttcaccttatcgcctggctacagtggcacgacattattcatcagcacctgggggaaaatgaaaccctgtttaattatcgcggcgataatccgttttatcaggcgttaaataaagaattacatattaaacgacgggcagttattcaggccgtaaacgataaacaaaatatcgccagtgcggtcgccagtatgatggggttagggattggccttacgccaagtgccgacgattatttaacaggtctggcgcttattttatttattcccgggcatccggcggaaaaatacaaagaggaattttatctcggtctgcaacgcggcaaaaataataccacattattaagtgccataacgctggaagccgcattacaacaacgctgccgggaaaatattcatcgttttattcacaacattatttatgacatccctgggaacgcaactcaggcaatagaaaaaattaaacatattggctccagttccggctgcgacatgctgtatggcatggccgatggttgtgcgctgagccaaacctacggagggaattatgtcagttaattaaccaaacctacggagggaattatgagtgttaaaatagtcattaaaccgaatacctattttgattctgtcagcctgatgtctatctccacgcgtgcaaataaactcgacggcgtcgagcaggcatttgtggcgatggcgaccgaaatgaataaaggcgtgctgaagaatttaggactgctgacgccggagctggagcaggcgaaaaacggcgacctgatgattgtcatcaatggtaaaagcggtgcggacaacgagcagttactggtggagattgaagaactgttcaacaccaaagcgcaaagcggcagccacgaggcgcgttacgccactattggcagcgccaaaaagcatatcccggaaagtaacctggcggtgattagcgtcaacggtctgtttgccgctcgcgaagcgcgtcaggcgctgcaaaacgatctcaacgtgatgctgttttccgataacgtcagtgttgaagatgaactggcgctcaagcaactggcccacgaaaaagggctgctgatgatggggccagactgtggcacggcgattatcaacggcgcggcgctctgttttggtaacgccgtgcgtcgcggcaacatcggtattgttggcgcatccggcaccggcagtcaggagttgagcgtccgcattcatgaatttggcggcggcgttagccaactgattggcaccggcgggcgcgacctgagcgagaaaatcggcggcctgatgatgctcgacgccatcgggatgctggaaaacgatccgcaaactgaaatcattgcgcttatctccaaaccgcctgcgcctgcggtggcccgcaaagtgctggaacgtgcgcgcgcctgccgcaagccggtggtcgtctgcttcctcgatcgtggcgaaacgccagtggatgagcaggggctacagtttgcccgcggcaccaaagaggcagcgctaaaagcggtgatgctctccggcgtgaaacaggaaaatctcgacctgcatacgcttaaccagccgttgattgcggatgtgcgtgcgcgtctgcaaccgcagcagaaatacattcgtggcctgttctgcggcggcacgctgtgcgacgaaaccatgttcgcggtgatggaaaaacatggcgatgtctacagcaacattcagcccgatccggaattccgcctgaaagatatcaaccgcagcatcaaacacaccttcctcgactttggcgatgacgacttcaccaatggcaagccgcacccgatgattgaccccaccaaccgcatcagtcgcttgatcgaagaggcgcgcgatccagaagtggcggtgatcgtgatggattttgtgctcggatttggaagccatgaagatccggtcggctccaccatcgagacgatcaaagaagcgaaagcgatcgccgctgccgaaggacgcgagttgatcattctcgcctatgtgctgggtaccgatcttgatacgccaagcttagaacaacaaagccagatgctgcttgatgccggagtgattctggcgagcagcagcaccaataccggattgctggcgcgtgaatttatctgcaaaggggaggaagcctgatgagccagagtctgtttagccaaccattgaacgttattaacgtcggcatcgccatgtttagcgatgacctgaaaaagcagcatgtagaagtgactcaactcgactggacgccgccggggcagggcaatatgcaggtggtgcaggcgctggataacattgccgatagcccgctggcggacaaaatcgccgccgctaaccagcaggcgctggagcgtattatccagagccatccggtgctgattggttttgatcaggcgattaacgtggtgccgggcatgacggcgaaaaccattcttcacgccgggccgccgatcacctgggaaaaaatgtgcggcgcgatgaaaggcgcggtcaccggagcgctggtgttcgaaggactggcgaaagatctcgacgaggcggctgaactggcggcttccggggagatcaccttcagcccgtgtcacgagcacgactgcgtgggaagcatggcgggtgttaccagcgccagcatgtttatgcacatcgtaaaaaacaaaacctacggcaacatcgcttataccaacatgagcgagcagatggcgaagattttgcgtatgggcgctaacgaccagagcgtgattgaccgcctgaactggatgcgtgatgtgcagggaccaatactgcgcgacgcgatgaaaattatcggcgaaatcgatctgcgcttaatgctggcgcaggcgctgcatatgggcgatgagtgccataaccgcaataacgccgggacgacactgctgattcaggcgctgacgccggggattattcaggcgggttattccgtcgagcaacagcgcgaagtgtttgagtttgtcgccagcagcgactacttctccggcccgacgtggatggcgatgtgtaaagcggcgatggatgcggcgcatggcatcgaatacagcaccgtggtcaccaccatggcgcgtaacggcgtcgagttcggcctgcgggtcagcggcctgccggggcaatggtttaccggcccggcgcagcaggtgatcggcccgatgtttgccggttataagccggaagatagcgggctggatatcggcgacagcgccatcaccgaaacctacggtattggcggatttgctatggcgaccgcgcccgctatcgtcgcgctggtgggcggcacggtggaagaagctattgatttctcccgtcagatgcgcgaaatcaccctcggtgaaaaccccaacgtcaccattccgctgctcggttttatgggcgtgccgagcgcaatcgacatcacccgcgtgggtagcagcggcattctgccggtgatcaacaccgccatcgcccataaagatgcgggcgtcggcatgattggcgcgggcattgtgcatccaccttttgcctgcttcgagaaagccattcttggctggtgcgaacgttacggcgtctgacctacatgttcatgccggatgcggcgtgaacgccttatccggcctacgaatggcgcaagaatctgtaggcctgataagcgtagcgcatcaggcatttgtcaccattgccggatgcggcgtgaacgccttatccggcctacgaatggcgcaagaatctgtaggcctgataagcgtagcgcatcaggcatttgccaccactgccggatgcggcgtggacgccttatccggcctacgagtggcgcgagaatctgtaggcctgataagcgtagcgcatcaggcatttgtcaccattgccggatgcggcgtgaacgccttatccggcctacgagtggcgcgagaattgtaagcctgataagcgtagcgcatcaggcagtctggcgttggtcataaccccatcaccctctgtagcggacataacaacatgaaagagcttgtggtcgttgccattggtggcaacagcattatcaaagataacgccagccagagcattgagcatcaggcggaggcggtgaaagccgtcgccgatacggtgctggaaatgctggcttccgattacgacattgtgctgacccacggcaacgggccgcaggtcgggctggatttacgccgtgcggagattgcccacaagcgcgaagggctgcccttaacgccgctggcgaactgtgtggcagatacgcagggcggcatcggctatctgatccaacaggcgctgaataaccggctggcgcgtcacggcgagaagaaagccgtcaccgtggtgactcaggtggaagtggataaaaacgatccaggttttgcccatcccaccaagcccatcggcgcattctttagtgacagccagcgtgacgaattacaaaaggcaaaccctgactggtgttttgttgaagatgccgggcggggctatcgccgcgtggtcgccagcccggaaccgaaacgtattgtcgaagcacctgccattaaagcgctgatccaacaaggttttgtcgtaattggcgcgggcggcggtggaattccggtagtgcgtactgacgcgggagattaccaaagcgtggacgcggttatcgacaaagatctctctaccgcgctgctggcccgtgaaattcacgccgacattcttgtgatcaccactggcgtcgaaaaagtgtgtattcactttggcaaaccgcagcagcaggcgctcgatcgggtggatattgccaccatgacccgctatatgcaggaagggcatttcccgcccggcagcatgttgccaaaaatcatcgccagcctgacatttttagaacaaggcggcaaagaagtgattatcaccacgccggaatgcctgcctgcggcgctgcgcggcgaaacgggcactcatattattaaaacgtaaggacgtaagatgaaagaaagcaatagccgccgtgaatttctgagccagagcggtaagatggtcaccgccgccgcgctgtttggtacctctgtgccgctcgcccatgcggcggtagctggcaccctaaactgcgaagcgaacaacaccatgaaaatcactgacccgcattactatctcgataacgtgctgctggaaaccggttttgactacgaaaatggcgtggcggtgcagacccgcacggcgcgccagaccgtggagattcaggacggcaaaattgtcgccctgcgcgagaacaagctgcatccggacgccacgctgccgcactatgacgctggcggtaagctgatgctgcccaccacccgcgacatgcatattcatctcgacaaaaccttttacggcgggccgtggcgcagcctcaatcgtccggcaggcaccaccatccaggacatgatcaaactcgagcagaaaatgctgccggaactgcaaccgtacactcaggagcgggcagaaaaactgattgatttattgcagagcaaaggcaccaccattgcccgcagccactgcaatatcgaaccggtttccggcctgaaaaatctgcaaaatttgcaggcggtgctggcgcgacgtcaggcgggctttgagtgtgaaatcgtcgccttcccgcagcacggtttgctgctgagcaaatctgaacctttaatgcgtgaagcgatgcaggcgggggcgcattacgtcggcggcctggacccgaccagtgttgatggcgcgatggaaaaatccctcgacaccatgttccagattgcgctggactacgacaaaggcgtcgatattcacctgcacgaaaccactccggcaggcgtggcagccatcaattatatggttgaaacggtagagaaaacgccacagctgaagggcaagctgaccatcagtcacgcctttgcgctggcaacgctcaacgagcaacaggtagatgaactggcgaaccggatggtggtgcaacaaatttctatcgccagcacggtgccgattggcacgctgcatatgccgctcaaacagttgcacgacaaaggcgtaaaagtgatgactggcactgacagcgttatcgaccactggagcccttatggtctgggcgacatgctggaaaaagccaatctgtacgcgcagctctatattcgtcctaacgaacagaacctctcccgcagcctgtttttagccactggcgatgtattgccgctgaatgaaaaaggcgagcgtgtatggccaaaagcgcaggatgacgccagctttgtgctggtggacgcctcctgttccgccgaggcggtggcgcgtatcagcccgagaaccgcaacgttccataaagggcaactggtgtgggggagtgtggcaggttgatgcgcatttgaaacgcctgcaacggtgaatagtaagagatttaagccccagggagtggggcaatctgaatatgagtgtgtcggcagaaatggacattatctttgaggaatatgcccttattgacgttgtgtagataactatttgtctacgtgaaaagatcatcagttttgccgattttagtcttttacagatagcaaatatcacacttacaggcgctcgccttatggggaacgttgctgctctgtttcattcaggctcgcggcatgttggggctggatcgggtggtttaaatattggctatattcaatggacgcgttttgccgcgatgacatatcaggcgttgccaaatacacatagctaatcaggagtaaacacaatgaagatcaaagctgttggtgcatattccgctaaacaaccacttgaaccgatggatatcacccggcgtgaaccgggaccgaatgatgtcaaaatcgaaatcgcttactgtggcgtttgccattccgatctccaccaggtccgttccgagtgggcggggacggtttacccctgcgtgccgggtcatgaaattgtggggcgtgtggtagccgttggtgatcaggtagaaaaatatgcgccgggcgatctggtcggtgtcggctgcattgtcgacagttgtaaacattgcgaagagtgtgaagacgggttggaaaactactgtgatcacatgaccggcacctataacagcccgacgccggacgaaccgggccatactctgggcggctacagtcaacagatcgtcgttcatgagcgatatgttctgcgtattcgtcacccgcaagagcagctggcggcggtggctcctttgttgtgtgcagggatcaccacgtatagcccgctacgtcactggcaggccgggccgggtaaaaaagtgggcgtggtcggcatcggcggtctgggacatatggggattaagctggcccacgcgatgggggcacatgtggtggcatttaccacttctgaggcaaaacgcgaagcggcaaaagccctgggggccgatgaagttgttaacagtcgcaatgccgatgagatggcggctcatctgaagagtttcgatttcattttgaatacagtagctgcgccacataatctcgacgattttaccaccttgctgaagcgtgatggcaccatgacgctggttggtgcgcctgcgacaccgcataaaagcccggaagttttcaacctgatcatgaaacgccgtgcgatagccggttctatgattggcggcattccagaaactcaggagatgctcgatttttgcgccgaacatggcatcgtggctgatatagagatgattcgggccgatcaaattaatgaagcctatgagcgaatgctgcgcggtgatgtgaaatatcgttttgttatcgataatcgcacactaacagactgaaaaaattaataaataccctgtggtttaacatattaacttcgctctccacttaactttttagttaaggagagcgaaataatatcaaagtagcagtaaaacctataacgtaaatttaaattgttaaattaacgccctccagtacacaatacttcacacgttagttatgagcgatttctgatagtgcctggtttaatcagagctttattatctgcgacgtttatttttatttaagagagatcgcgatgataagtttaaaagctccgcacaataatttgatgccatatacgcaacaaagcatacttaatacggttaaaaacaatcagttaccagaggatatcaaaagctccctggtttcctgtgtcgatatattcaaggttttgattaaacaatattatgattatccttatgattgtcgtgatgatttagtcgatgacgacaaactcattcatctcatggctgccgtacgagactgtgagtggagtgacgataacgcactcaccataaatgtgcagtttaatgatttccctggattttatgactggatggattaccctgatcacccggttaagtttgtttttcacatacttgaaaatcaaaaagggacagtttgggtatatgaccaggatgatgcgtttcttgatattaaagcaaacgtgcaggctggacgctttaccgggcttaagaaattagtgcagtttatcgatagtgtgcgaacagattgcaaatgtattcttcttgaataccatatgcctttgctgagaattttccctaaagggaaagagtgtatgcatgtggaaaaatggcttcgcgaaatgagctctattccggagacagacgcgcccattaagcaggcgcttgcgcatggattattattacacttaaaaaatatctaccctgtttttcctgaaagtctggtgatgttattgctctctgttctggacgtaaaaacatacagagatgatgcgcgattaaatgaatggatatctaatagagtgcaggaattaggtgacagatattatcctgtaaataagcacgttaaaatccgctacactctttaattcagaaagggttccacctgcaagttgttattccacctgagagtgaatcgcaatgcaggtaatcatttcatctgtatatctgtatgccaactggcattccatctcttttttcgccgatattttgttgtgatcggcgacacttcgcttaaaaaagcaccagtagtggtttcgcagccatgcggtgtataaaaaatgatctcatgcagatgttttgtgaatgtgttggttgacattcatatgaaaaaaatcataattccatcatgtttgtgtggggtcttttctgtatcttacgcatcgcactcaagcctgacagaaaatatgctgtaaggctcatatcaaaaaccgccattagctcatcaggaagagcagacgacaaccaggattgttgtatggtacggggttcgaggcctcgatggcggtccaacttttcaaaactcttctgaatcagatccccttattaagttccctgcaaagtggaacattgccattgtttggctatagtggatggggcagaccaatgaaaaaagcccacacaggggagagtgggctgaaatgggaggctaaagacagtagtaaacttatcggaaataaggaccacgcattacgggggctaagtagcccgatggccgtgattcggcaaatcaggttgattacgtaaagagtaaattatctgctcaccgctgcgtcaccccttcgtaaatcaggcgtagcgcgaatacaccaataattgcaccaataacccgactggcaacgcgttgcatacgcccataagcacgacgcacagcgggcaaagaaaacgcctgactaagaaaaactcgccagataatacttgcgagcacaatccccgcccaggccattaaacgtgcccatgttggtgtttctgcatttaatgttacactgaaaatactgataaaaaataaaacggtttgcgggttagagagatcggtaattaatccgcggcgaaaaaagacataccagggggcgctaatcggttgttgtagtgtgctcatttgcggtgtactctggcggcgcatgctgcaccacgcaaaccataagagataagcgccgccgacgattctgataaggctaaaaatctcctcacactgcgtaattagcgttgcaagaccaaacaaacccaacccggaataaaatgcatcgcccagcgccacgcccagcccggtcagcacccctgcgcgtcgaccggaagccaggctggtttgtactaccacaaagagattggctcccggattaaaaaaagtaatcacgaacagtcctacggtcaggtaaacggcatgcaaaggatccatagtgatttcatccataaataagtgaactaactgcatcatatttctaccaaaaataatcgggtgcgagagagatcacaaagtgtcttatttccggttactggcgtttatgccctgactgaactaattattaatcaacccaataatgtgggtgggtgatagtgtgataacaactctggagccgtaatatgaaaataatctctaaaatgttagtcggtgcgttagcgttagccgttaccaatgtctatgccgctgaattgatgaccaaagcggaatttgaaaaagttgaaagccagtatgaaaaaataggtgatattagtaccagcaatgaaatgagcactgcagatgcaaaagaagatttgatcaaaaaagcggatgaaaaaggggctgatgtgttggtactgacctccggtcaaactgacaataagatccacggcacggcaaatatttataagaagaagtaattctgaatcctatgtaaacatctccgatgcgtaagtttatcggtgatcatctattgaaatttatgccggataaagcgttcgcgctgcattcggcagttcagcttttcagccgccgccagaacgtcgtccggctgatgcctaaataattcgccgctgctgttttatcgccattaaatttctccagtgcctgttgtggtgtcagtaagcgtggagcgggagttttcgcgctctcgcgcgccagttccggcagtagcagttgcataaactgcggcgttaaatccggcgtcggttccacacttaaaaacagcgccagtcgttccatcatattgcgcagttcacgaatattgcctggccagtcgtagtgcagcagcacagtttcacttgcctgtaacccctggcgtaatgcagcagaaaatggggcggagagcgccgccagagacactttcaaaaagctttccgccagcggaagaatatccgccacccgctcgcgcagtggtggcaattgcagacgcaaaatactcagccgataaaacagatcacggcgaaaacgtccttgctgcatatcttcttccagattgcagtgagtggcgctaatgacccgtacatctaccggaacaggctgatgcccgccgacgcgggtgacctctttttcttccagcacccgcagcagccgggtctgcaaaggtagcggcatttcgccaatctcatccagaaacagcgtaccgccgtgggcaatttcgaacagcccggcgcgacctccgcgtcggctgccggtaaacgccccttcctcatagccaaacagttctgcttccagcaggctttcggcaatcgccccgcagttgacggcaacaaacggatggctctttttgccctgtcgcgcatcgtggcgggcaaaatattcccgatgaatcgcctgggccgccagctctttgcccgtccccgtttccccctcaatcaacaccgccgcactggagcgggcatacagcaaaatagtctgccgtacttgttccatctgtggactttgaccgagcatatcgcccagcacgtaacgagtacgcagggcgttgcgggtggcatcgtgagtgttatggcgtaagctcatgcgcgtcatatccagcgcatcgctgaacgcctggcgcacggtggcggcggaatagataaaaattccggtcattccggcttcttctgccaaatcggtaatcagccctgcgccgaccaccgcttcggtgccgttagcttttagctcgttaatctgcccgcgtgcgtcttcctcggtaatgtagctacgttggtcgaggcgcaaattaaaggttttttgaaacgccaccagcgctggaatggtttcctgataggtgacaacgccgatagaagaggtgagttttccggcttttgccagtgcctgtaacacatcgtagccgctcggtttaatcaaaataactggcacactcaggcggcttttcaggtacgcgccgttagagccagccgcgatgatggcgtcacagcgttcgtttgccagtttcttgcggatgtaggtcactgctttttcaaagccaagctgaataggggtaatgttcgccaggtgatcaaactcgaggctgatatcgcgaaacagctcgaacaggcgcgttacagataccgtccagataaccggtttgtcgtcattaagccgtggtggatgtgccatagcgcaccgcaaagttaagaaaccgaatattgggtttagtcttgtttcataattgttgcaatgaaacgcggtgaaacattgcctgaaacgttaactgaaacgcatatttgcggattagttcatgactttatctctaacaaattgaaattaaacatttaattttattaaggcaattgtggcacaccccttgctttgtctttatcaacgcaaataacaagttgataacaaaggatgggctatgtctctacactctccaggtaaagcgtttcgcgctgcactgactaaagaaaatccattgcagattgttggcaccatcaacgctaatcatgcgctgttggcgcagcgtgccggatatcaggcaatttatctttctggcggtggcgtggcggcaggtagcctggggctgcccgatctcggtatttctacccttgatgatgtgctgaccgacattcgccgtatcaccgacgtttgtagcctgccgctgctggtggatgcggatatcggttttggttctagcgcctttaacgtggcgcgcaccgtgaaaagcatgattaaagccggtgcggcaggattgcatattgaagatcaggttggtgcgaaacgctgcggtcatcgtccgaataaagcgatcgtcagcaaagaagagatggtggatcggatccgcgcggcggtggatgcgaaaaccgatcctgattttgtgatcatggcgcgcaccgatgctctggcggtagaggggctggatgcggcgatcgagcgtgcgcaggcctatgttgaagcgggtgccgagatgttgttcccggaggcgattaccgaactcgccatgtaccgccagtttgccgatgcggtgcaggtgccgatcctcgccaacatcaccgaatttggtgccacgccgctgtttaccaccgacgaattacgcagcgcccatgtcgcaatggcgctgtacccacttagtgcgttccgcgccatgaaccgcgccgctgaacatgtctacaacgtcctgcgccaggaaggcacgcagaaaagcgtcatcgacaccatgcagacccgcaacgagctgtacgaaagcatcaactactaccagtacgaagagaagctcgacaacctgtttgcccgtagccaggtgaaataaaaaacgcccgttgattgtattcgacagccgatgcctgatgcgtcgctgacgcgacttatcaggcctacgaggtgcactgaactgtaggtcggataagacggatggcgtcgcatccgacaaccgatgcctgatgcgccgctgacgtgacttatcaggcctacggggtgcactgaactgtaggtcggataagacgcatagcgtcgcatccgacaaccgatgcctgatgcgccgctgacgcgacttatcaggcctacggggtgcactgaactgtaggtcggataagacgcatagcgtcgcatccgacaaccgatgcctgatgcgccgctgacgcgacttatcaggcctacggggtgaactgaactgtaggtcggataagacgcatagcgtcgcatccgacaacaatctcgaccctacaaatgataacaatgacgaggacaacatgagcgacacaacgatcctgcaaaacagtacccatgtcattaaaccgaaaaaatctgtggcactttctggcgttccggcgggcaatacggcgctctgcaccgtgggtaaaagtggcaatgacctgcattaccgcggctacgatattcttgatctggcgaaacattgcgaatttgaagaagtggcgcatctgctgatccacggcaaactgccgacccgtgacgaactcgccgcttacaaaacgaaactgaaagccctgcgcggtttaccggctaacgtgcgtaccgtgctggaagccttaccggcggcgagccacccgatggatgttatgcgcaccggtgtttccgcgctcggctgcacgctgccagaaaaagaggggcataccgtctctggcgcgcgggatattgccgacaaactgctggcgagccttagcagcattctcctttattggtatcactacagccacaacggcgaacgcatccaaccggaaaccgatgacgactccatcggcggtcacttcctgcatctgctgcacggcgaaaagccaagccaaagctgggaaaaggcgatgcatatcagcctggtgctgtacgccgaacacgagtttaacgcctccacctttaccagtcgggtgattgcgggcaccggctctgatatgtattccgcgattattggcgcgattggcgcactgcgcgggccaaaacacggcggggcgaatgaagtgagcctggagatccagcaacgctacgaaacgccggacgaagccgaagcagatatccgcaagcgcgtggaaaacaaagaagtggtcattggttttggtcatccggtttacaccatcgctgacccgcgccaccaggtgattaaacgtgtggcgaagcagctcagccaggaaggcggcagcctgaagatgtacaacatcgccgatcgcctggaaacggtgatgtgggagagcaaaaagatgttccccaatctcgactggttctctgctgtttcctacaacatgatgggcgttcccaccgagatgttcacaccactgtttgttatcgcccgcgtcaccggctgggcggcgcacattatcgaacaacgtcaggacaacaaaattatccgtccttccgccaattatgttggaccggaagaccgcccgtttgtcgcgctggataagcgccagtaaacctctacgaataacaataaggaaacgtacccaatgagtgctcaaatcaacaacatccgcccggaatttgatcgtgaaatcgttgatatcgtcgattacgtcatgaactacgaaatcagctctaaagtggcctacgacaccgcacattactgcctgctcgacacgctcggctgcggtctggaagctctcgaatacccggcctgtaaaaaactgctggggccaattgttcccggcaccgtcgtacccaacggcgtgcgcgtccccggaactcagttccagctcgaccccgtccaggcggcatttaacatcggcgcgatgatccgctggctcgatttcaacgatacctggctggcggcggagtggggccatccttccgacaacctcggcggcattctggcaacggcggactggcttagccgcaacgcggtcgccagcggcaaagcgccgttgaccatgaaacaggtgctgaccgcaatgatcaaagcccatgaaattcagggctgcatcgcgctggaaaactcctttaaccgcgtcggcctcgaccacgttctgttagtgaaagtggcttccaccgccgtggtcgccgaaatgctcggcctgacccgcgaggaaattctcaacgccgttagcctggcgtgggtggacggtcagagcctgcgcacctatcgccatgcgccgaacaccggcacgcgtaaatcctgggcggcgggcgatgccacttcccgcgcggtacgtctggcactgatggcgaaaacgggcgaaatgggttacccgagtgccctgactgcgccggtgtggggcttctacgacgtctcctttaaaggtgaaagcttccgcttccagcgcccgtacggttcctacgttatggaaaatgtgctgttcaaaatctccttcccggcggagttccactcccagacggcagttgaagcagcgatgacgctctatgaacagatgcaggcagcaggcaaaacggcggcggatatcgaaaaagtgaccattcgcacccacgaagcctgtattcgcatcatcgacaaaaaagggccgctcaataacccggcagaccgcgatcactgcattcagtacatggtggcgatcccgctgctattcgggcgcttaacggcggcagattacgaggacaacgttgcgcaagataaacgcattgacgccctgcgcgagaagatcaattgctttgaagatccggcatttaccgctgactaccacgacccggaaaaacgcgccatcgccaatgccattacccttgagttcaccgacggcacacgatttgaagaagtggtggtggagtaccccattggtcatgctcgccgccgtcaggatggtattccgaaactggtcgataaattcaaaatcaatctcgcgcgccagttcccgactcgccaacagcagcgcattctggaggtttctctcgacagagctcgcctggaacagatgccggtcaatgagtatctcgacctgtacgtcatttaagtaaacggcggtaaggcgtaagttcaacaggagagcattatgtcttttagcgaattttatcagcgtagcattaacgaaccggagcagttctgggccgagcaggcccggcgtattgactggcagacgccctttacgcaaacgctcgatcacagcaatccgccgtttgcccgttggttttgtgaaggccgaaccaacttgtgccacaacgccatcgaccgctggctggagaaacagccagaggcgctggcgctgattgccgtctctagcgaaacagaagaagagcgcacctttacctttcgtcagctgcatgacgaagtgaacgcggtggccagtatgttgcgtagtttgggtgtgcagcgcggcgatcgggtgctggtgtatatgccgatgattgccgaagcgcatattactctgctggcctgcgcgcgcattggcgctattcacagcgtggtgtttggtggatttgccagctacagcgtggcggcgcgaattgatgacgctaaaccggtgctgattgtcagcgctgatgccggagcgcgcggtggcaaaatcattccctataaaaaattgctcgacgatgcgataagtcaggcgcagcaccagccacgccatgttttgctggtggatcgcgggctggcgaaaatggcgcgcgtcagcgggcgggatgtcgatttcgcgagcttgcgccatcaacacatcggcgcgcgggtaccggtggcgtggctggaatccaacgaaacctcctgcattctctacacttccggcacgaccggcaaacctaaaggcgtgcagcgtgacgtcggcggatatgcggtggcgctggcgaccagcatggacaccatttttggcggcaaagcgggcagcgtgttcttttgcgcaagcgatatcggctgggtggtggggcatagctatatcgtttacgcgccgctgctggcggggatggcgactatcgtttacgaaggattgccgacctggccggactgcggcgtgtggtggacaatcgtcgagaaatatcaggttagccggatgttcagtgcgccgaccgccattcgcgtgctgaaaaaattccctaccgctgaaattcgcaaacacgatctcagcagcctggaagtgctctatctggctggagaaccgctggacgagccgaccgccagttgggtgagcaatacgctggatgtgccggtcatcgacaactactggcagaccgaatccggctggccgattatggcgattgctcgcggtctggacgacaggccgacgcgtctgggaagccccggtgtgccgatgtatggctataacgtgcagttgcttaatgaagtcaccggcgaaccgtgtggcgtcaacgagaaagggatgctggtggtggaagggccgctgccgccggggtgtattcagaccatctggggcgacgacggccgctttgtgaagacttactggagcctgttttcccgcccggtgtacgccacctttgactggggcatccgtgacgctgacggttatcactttattctcgggcgcactgacgatgtaattaacgttgccgggcatcggctggggacgcgcgagattgaagagagtatctccagccatccgggcgttgccgaagtggcggtggttggggtgaaagatgcgctgaaagggcaggtggcggtggcgtttgtcattccgaaagagagcgacagtctggaagatcgtgatgtggcgcacagccaagagaaggcgattatggcgctggtggacagccagattggcaactttggccgcccggcgcacgtctggtttgtcagccaattgccaaaaacgcgatccggaaaaatgctgcgccgcacgatccaggcgatttgcgaaggacgcgatcctggagatctgacgaccattgatgatcctgcgagcttggatcagatccgccaggcgatggaagagtaagttattgtcggatgcgtcgcgcggtgcatccggcactgtgtgccgatgcctgatgcgacgctgacgcgttttatcatgcctacggacctgaaccgtaggtcggataaggcgctcgcgtcgcatccgacaccatgctcagatgcctgatgcgacgctgacgcgtcttatcaggcctacccactgtttttacaccgataatttttcccccacctttttgcactcattcatataaaaaatatatttccccacgaaaacgattgctttttatcttcagatgaatagaatgcggcggattttttgggtttcaaacagcaaaaagggggaatttcgtgagccaagataacaactttagccaggggccagtcccgcagagcgcgcggaaaggggtattggcattgacgttcgtcatgctgggattaaccttcttttccgccagtatgtggaccggcggcactctcggaaccggtcttagctatcatgatttcttcctcgcagttctcatcggtaatcttctcctcggtatttacactagttttctcggttacattggcgcaaaaaccggcctgaccactcatcttcttgctcgcttcagctttggtgttaaaggcagttggctgcctagtctgctactgggcggaactcaggttggctggtttggcgtcggtgtggcgatgtttgccattccggtgggtaaggcaaccgggctggatattaatttgctgattgccgtttccggtttactgatgaccgtcaccgtcttttttggcattagcgcgctgacggttcttagcgtgattgcggttccggctatcgcctgcctgggcggttattccgtgtggctggctgttaacggcatgggcggcctggacgcattaaaagcggtcgttcccgcacaaccgttagatttcaatgtcgcgctggcgctggttgtggggagttttatcagtgcgggtacgctcaccgctgactttgtccggtttggtcgcaatgccaaactggcggtgctggtggcgatggtggcctttttcctcggcaacagcttgatgtttattttcggtgcagcgggcgctgcggcactgggcatggcggatatctctgatgtgatgattgctcagggcctgctgctgcctgcgattgtggtgctggggctgaatatctggaccaccaacgataacgcactctatgcgagcggtttaggtttcgccaacattaccgggatgagcagcaaaacccttagcgtaatcaacggtattatcggtacggtctgcgcattatggctgtataacaattttgtcggctggttgaccttccttagcgcagctattcctccagtgggtggcgtgatcatcgccgactatctgatgaaccgtcgccgctatgagcactttgcgaccacgcgtatgatgagtgtcaattgggtggcgattctggcggtcgccttggggattgctgcaggccactggttaccgggaattgttccggtcaacgcggtattaggtggcgcgctgagctatctgatccttaacccgattttgaatcgtaaaacgacagcagcaatgacgcatgtggaggctaacagtgtcgaataactaagacgcatgtggaggctaacagtgagcaataacgctttacaaacaattattaacgcccggttaccaggcgaagaggggctgtggcagattcatctgcaggacggaaaaatcagcgccattgatgcgcaatccggcgtgatgcccataactgaaaacagcctggatgccgaacaaggtttagttataccgccgtttgtggagccacatattcacctggacaccacgcaaaccgccggacaaccgaactggaatcagtccggcacgctgtttgaaggcattgaacgctgggccgagcgcaaagcgttattaacccatgacgatgtgaaacaacgcgcatggcaaacgctgaaatggcagattgccaacggcattcagcatgtgcgtacccatgtcgatgttagcgatgcaacgctaactgcgctgaaagcaatgctggaagtgaagcaggaagtcgcgccgtggattgatctgcaaatcgtcgccttccctcaggaagggattttgagctatcccaacggtgaagcgttgctggaagaggcgttacgcttaggggcagatgtagtgggggcgattccgcattttgaatttacccgtgaatacggcgtggagagcctgcataaaaccttcgccctggcgcaaaaatacgaccgtctcatcgacgttcactgtgatgagatcgatgacgagcagagccgctttgtcgaaaccgttgctgccctggcgcaccatgaaggcatgggcgcgcgagtcaccgccagccacaccacggcaatgcactcctataacggggcgtataccagtcgcctgttccgcttgctgaaaatgtccggtattaactttgtcgccaacccgctggtcaatattcatctgcaaggacgtttcgatacgtatccaaaacgtcgcggcatcacgcgcgttaaagagatgctggagtccggcattaacgtctgctttggtcacgatgatgtcttcgatccgtggtatccgctgggaacggcgaatatgctgcaagtgctgcatatggggctgcatgtttgccagttgatgggctacgggcagattaacgatggcctgaatttaatcacccaccacagcgcaaggacgttgaatttgcaggattacggcattgccgccggaaacagcgccaacctgattatcctgccggctgaaaatgggtttgatgcgctgcgccgtcaggttccggtacgttatagcgtacgtggcggcaaggtgattgccagcacacaaccggcacaaaccaccgtatatctggagcagccagaagccatcgattacaaacgttgaacgactgggttacagcgagcttagtttatgccggatgcggcgtgaacgccttatccggcctacgtagagcactgaactcgtaggcctgataagcgtagcgcatcaggcaattccagccgctgatctgtgtcagcggctaccgtgattcattcccgccaacaaccgcgcattcctccaacgccatgtgcaaaaatgccttcgcagcggctgtctgccagctgtagtttatgccggatgcggcgtgaacgccttatccggcctacgtagagcactgaactcgtaggcctgataagcgtagcgcatcaggcaattccagccgcagacctgtgtcagcggttaccgactttcatttccgccaacaaccgcgcatttatccaacgccatgtgcaaaaatgccttcgcggcggctgtctgccagctatttttccgccgcaacaaaaccgccgttctctccagtagtggcggggcaagagaaatagctttaagcccgtcatgttgtgtggcaatcgctgctggtaacaatgtggaaagggaagtgcggcgaatcagctccagaaccgcgctaatactgttcgcctcaatgaccacctgtggatgtagccccgctttctcgcagtagtggtcaatttgctctctggtggcaaattccgcgctgagcaggaccagtttttcatcatgcaagcgactcaacgccacctgttcatggacggccagcggatgatgttgcgccacgactaacgctaaactttctgtcagtaaaggaattgcctccagctccgggctatgcacaggcgcgaaggcaatcccaacgtccaactcgtcgcggcaaagcatatcctcgattttctcctggctcatttcctgtagctggagcgtgatgctgggatagcgcgcatagaaatccgccattaaggggccgataaagtagctcgtaaaggtgggggtgacggcgatacgcaggcttcctcgcgtcagatcggcaacatcatgaatcgcccgtttacccgcccccagttcctgtaacgcccggctggcgtactgtcgccagacttctcctgcatcagtgagacgaatcgttcgcccgctacggtcaaacagcggcacgcctaaactctcctctaactggcgaatctgctgggaaagcgcaggttgggagacgtgcaacgcactggcggcacgggtgaagctgccatgttcagccacggcaagaaaataattgatatgtcgagagagcattcgcaacctataagtaaatccaatggaactcatcataaatgagacttttaccttatgacaatcggcgagtagtctgcctctcattccagagacagacagaggttaacggtgaaagagattattgatggattccttaaattccagcgcgaggcatttccgaagcgggaagccttgtttaaacagctggcgacacagcaaagcccgcgcacactttttatctcctgctccgacagccgtctggtccctgagctggtgacgcaacgtgagcctggcgatctgttcgttattcgcaacgcgggcaatatcgtcccttcctacgggccggaacccggtggcgtttctgctagcgtggagtatgccgtcgctgcgcttcgggtatctgacattgtgatttgtggtcattccaactgtggcgcgatgaccgccattgccagctgtcagtgcatggaccatatgcctgccgtctcccactggctgcgttatgccgatagtgcccgcgtcgttaatgaggcgcgcccgcattccgatttaccgagtaaagctgcggcgatggtacgtgaaaacgtcattgctcagttggctaatttgcaaactcatccaagcgtgcgcctggcgctcgaagaggggcggatcgccctgcacggctgggtctacgacattgaaagcggcagcatcgcagcttttgacggcgcaacccgccagtttgtgccactggccgctaatcctcgcgtttgtgccataccgctacgccaaccgaccgcagcgtaaccttatttttaaaccatcaggagttccaccatgattcagagtcaaattaaccgcaatattcgtcttgatcttgccgatgccattttgctcagcaaagctaaaaaagatctcagttttgccgagattgccgacggcaccggtctggcagaagcctttgtaaccgcggctttgctgggtcagcaggcgcttcctgccgacgccgcccgcctggtcggggcgaagctggatctcgacgaagactccattctactgttgcagatgattccactgcgtggctgcattgatgaccgtattccaactgacccaacgatgtatcgtttctatgaaatgttgcaggtgtacggtacaaccctgaaagcgttggttcatgagaaatttggcgatggcattattagcgcgattaacttcaaactcgacgttaagaaagtggcggacccggaaggtggcgaacgtgcggtcatcaccttagatggtaaacatctgccgaccaaaccgttctgacagccatgcgcaaccatcaaaagacgttcacgatgctgctggtactggtgctgattggtcttaatatgcgaccactgctcacctccgtcgggccactgctaccgcaattgcgccaggcgagcggaatgagctttagcgtggctgccctgttgaccgctctgccggtggttaccatgggcgggctggcgctggccggaagctggcttcatcagcatgtcagcgaacgtcgcagtgtcgccatcagtctgttgctgattgccgtcggtgcattgatgcgtgagctttacccgcaaagtgcgctgctgcttagcagcgcactgcttggtggggtggggatcggcatcattcaggcggtgatgcctagcgtgattaaacggcggtttcagcagcgcacgccactggtgatggggctgtggtccgcggctctgatgggcggcggtgggcttggtgccgccataacgccctggttagttcaacatagcgaaacctggtatcaaacactcgcctggtgggcgctgcctgccgttgttgcgctctttgcctggtggtggcaaagcgcccgcgaggtcgcctcttcccacaagacaacaaccactccggttcgcgtggtattcactccccgcgcgtggacgctgggtgtttacttcggtctgattaacggcggttacgccagcctgattgcctggttacccgctttctatattgagattggtgccagcgcgcagtacagcggttccttactggcattgatgacgcttgggcaagccgcaggagctttgctgatgcctgctatggctcgccatcaggatcggcgcaaactgttaatgctggcgctggtgttacaactggtggggttctgcggctttatctggctgccgatgcaattgccggtattgtgggcgatggtgtgtgggttaggtctgggcggcgcgtttccgctctgtttgctgctggcgctcgatcactctgtgcaaccggctattgctggcaagctggtggcgtttatgcagggaatcggttttatcatcgccgggcttgccccgtggttttctggcgtgctgcgtagtatcagcggcaattacctgatggactgggcatttcatgcgctgtgcgtcgttgggctgatgatcataaccctgcgttttgcaccagtacgttttccgcagctgtgggtcaaagaggcatgatgcgacgcttgttcctgcgctttgttcatgccggatgcggctaatgtagatcgctgaacttgtaggcctgataagcgcagcgtatcaggcaatttttataatttaaacactgctttcaactttataatctttgaaataatagtgcttatcccggtcgtttatttcgcgaataacccgacaaggaacgccagccgccacgacgtttggtggaatgtcttttgtgacgatactacccgcgccaataacagaattatccccgatggtgacgcctggattaataaccacatgacttccgatccagacgttattgccaatcgttatcggaaaagagtacatctcgccgttttttctcaattcatggtgtacagggtgtcccgtaacggaaagagtaacgttgggtgcaatcagtacgttatcaccgattgttaccgtgtagtcatcgacaatggttaaattgaaatttgcataaaaattgcggcctatatggatgttggaaccgtaagagaaatagacaggcggttctacccaggcgttttcccctaccgtggcaaacatttctttaatcaggctttctcttttttcaacttcacttggatggctgtgattaaactcatacattaacgttttcccacgaagtcttttttccggtaagccttcgcacatatcggtaaatagcttgcctgctcttattctttcggtcattggcatgttcaatgcgatcactccgttatgatatgttggtcggataaggcgctcgcgccgcatccgacattgattgcttaagcgacttcattcacctgacgacgcagcagggaaagcgggccggggccgctaagcgtgaacacggaaattaaggtgaagcccagcgccaccagacccagcaccagataagcgccctggaaaccgatgctttcatacatattgcccgccagtacagacataaaaatcatcgccagttgcttaaagaagcagaaacagaccagataaatcgtcgcactaaaacgcacttcaaactggctggtaatatatttaaagcagcccaccagcaggaacggtacttcaaacatatgcagcgttttcagaataaccacttccagcgcactggtggcgaagctactgccaataatacgtacagacataatagtgccagccagcagcagggcgtttttcccaccgatgcgattaatgatcagtggcgcaaagaacataatgctggcgttaagtaattcgcccattgtcgttacgtagccaaatacccgcgtaccctgttcaccggtagcaaagaagctagtaaagaaattagcaaactgttggtcaaaaacatcgtaggtgcaggaaacgccaataacatacagactcaaaaaccacagttttggctgtctgaacagttccagtgccagcttaaggctaaatgcgctatggttggcacctaccgcattggcaaccgtggcagaagagggcgcatccgttttggcgaaaaagagtaaaacggcgaggatgagtgcacagccagagcccagccagaaaacaaactgattattgatggtgaacatgatgccgacaatgctggcacacagcgcccagccaacacagccaaacatccgcgcgcgaccaaattcgaaattactgcgacggctgactttctcaataaatgcctctactgctggcgcaccggcgttaaaacaaaagcctagataaataccaccaacaatgcttcctactaaaatgttgtattgtaacagtggcccgaagataaaaataaagaacggcgcaaacatcactaacatgccggtaataatccacagcaggtatttgcgcagcccgagtttgtcagaaagcagaccaaacagcggttggaataataggctgaacagagaaatagcggcaaaaataatacccgtatcacttttgctgatatggttgatgtcatgtagccaaatcgggaaaaacgggaagtaggctcccatgataaaaaagtaaaagaaaaagaataaaccgaacatccaaaagtttgtgttttttaaatagtacataatggatttccttacgcgaaatacgggcagacatggcctgcccggttattattatttttgacaccagaccaactggtaatggtagcgaccggcgctcagctggaattccgcgcttacactcgggctccaggagtcgtcgccaccaatccccatatggaaaccgtcgatattcagccatgtgccttcttccgcgtgcagcagatggcgatggctggtttccatcagttgctgttgactgtagcggctgatgttgaactggaagtcgccgcgccactggtgtgggccataattcaattcgcgcgtcccgcagcgcagaccgttttcgctcgggaagacgtacggggtatacatgtcactcaatggcagatcccagcggtcaaaacaggcggcagtaaggcggtcgggatagttttcttgcggccctaatccgagccagtttacccgctctgctacctgcgccagctggcagttcaggccaatccgcgccggatgcggtgtatcgctcgccacttcaacatcaacggtaatcgccatttgaccactaccatcaatccggtaggttttccggctgataaataaggttttcccctgatgctgccacgcgtgagcggtcgtaatcagcaccgcatcagcaagtgtatctgccgtgcactgcaacaacgctgcttcggcctggtaatggcccgccgccttccagcgttcgacccaggcgttagggtcaatgcgggtcgcttcacttacgccaatgtcgttatccagcggtgcacgggtgaactgatcgcgcagcggcgtcagcagttgttttttatcgccaatccacatctgactaagaaagccactctggcggttaaattgccaacgcttattacccagctcgatgcaaaaatccatttcgctggtggtcagatgcgggatggcgtgggacgcggcggggagcgtcacactgaggttttccgccagacgccactgctgccaggcgctgatgtgcccggcttcactccatgcggtcgcgttcggttgcactacgcgtactgtgagccagagttgcccggcgctctccggctgcggtagttcaggcagttcaatcaactgtttaccttgtggagcgacatccagaggcacttcaccgcttgccagcggcttaccatccagcgccaccatccagtgcaggagctcgttatcgctatgacggaacaggtattcgctggtcacttcgatggtttgcccggataaacggaactggaaaaactgctgctggtgttttgcttccgtcagcgctggatgcggcgtgcggtcggcaaagaccagaccgttcatacagaactggcgatcgttcggcgtatcgccaaaatcaccgccgtaagcgctccacgggttgccgttttcatcatatttaatcaggctctgatccacccagtcccagacgaagccgccctgtaaacggggatactgacgaaacgcctgccagtatttagcgaaaccgccaagactgttacccatcgcgtgggcgtattcgcaaaggatcagcgggcgcgtctctccaggtaggctaagccattttttgatggaccatttcggcacagccgggaagggctggtcttcatccacgcgcgcgtacatcgggcaaataatatcggtggccgtggtgtcggctccgccgccttcatactgcaccgggcgggaaggatcgacagatttgatccagcgatacagcgcgtcgtgattagcgccgtggccactttcattccccaggctccagatgatcacactcgggtgattacgatcgcgctgcaccattcgcgttacgcgttcgctcatcgccggtagccagcgcggatcatcggtcagacgattcattggcaccatgccgtgggtttcaatattggcttcatccaccacatacaggccgtagcggtcgcacagcgtgtaccacagcggatggttcggataatggctacagcgcacggcgttaaagttgttctgcttcatcagcaggatatcctgcaccatcgtctgctcatccatgacctgaccatgcagaggatgatgctcgtgacggttaacgcctcgaatcagcaacggcttgccgttcagcagcagcagaccattttcaatccgcacctcgcggaaaccgacatcgcaggcttctgcttcaatcagcgtgccgtcggcggtgtgcagttcaaccaccgcacgatagagattcgggatttcggcgctccacagtttcgggttttcgacgttcagacgtagtgtgacgcgatcggcataaccaccacgctcatcgataatttcaccgccgaaaggcgcggtgccgctggcgacctgcgtttcaccctgccataaagaaactgttacccgtaggtagtcacgcaactcgccgcacatctgaacttcagcctccagtacagcgcggctgaaatcatcattaaagcgagtggcaacatggaaatcgctgatttgtgtagtcggtttatgcagcaagctgacgtcacggaaaatgccgctcatccgccacatatcctgatcttccagataactgccgtcactccagcgcagcaccatcaccgcgaggcggttttctccggcgcgtaaaaatgcgctcaggtcaaattcagacggcaaacgactgtcctggccgtaaccgacccagcgcccgttgcaccacagatgaaacgcgctgttaacgccatcaaaaataattcgcgtctggccttcctgtagccagctttcatcaacattaaatgtgaggctgtaacaacccgtcggattctccgtgggaacaaacggcggattgaccgtaatgggataggtcacgttggtgtagatgggcgcatcgtaaccgtgcatctgccagttactggggacgacgacagtatcggcctcaggaagatcgcactccagccagctttccggcaccgcttctggtgccggaaaccaggcaaagcgccattcgccattcaggctgcgcaactgttgggaagggcgatcggtgcgggcctcttcgctattacgccagctggcgaaagggggatgtgctgcaaggcgattaagttgggtaacgccagggttttcccagtcacgacgttgtaaaacgacggccagactatccgtaatcatggtcatagctgtttcctgtgtgaaattgttatccgctcacaattccacacaacatacgagccggaagcataaagtgtaaagcctggggtgcctaatgagtgagctaactcacattaattgcgttgcgctcactgcccgctttccagtcgggaaacctgtcgtgccagctgcattaaactatcggccaacgcgcggggagaggcggtttgcgtattgggcgccagggtggtttttcttttcaccagactgacgggcaacagctgattgcccttcaccgcctggccctgagagagttgcagcaagcggtccacgctggtttgccccagcaggcgaaaatcctgtttgatggtggttaacggcgggatataacaactgctgtcttcggtatcgtcgtatcccactacgctgatatccgcaccaacgcgcagcccggactcggtaatggcgcgcattgcgcccagcgccatctgatcgttggcaaccagcatcgcagtgggaacgatgccctcattcagcatttgcatggtttgttgaaaaccggacatggcactccagtcgccttcccgttccgctatcggctgaatttgattgcgagtgagatatttatgccagccagccagacgcagacgcgcgctgacagaacttaatgggcccgctaacagcgcgatttgctggtgacccaatgcgaccagatgctccacgcccagtcgcgtaccgtcttcatgggagaaaataatactgttgatgggtgtctggtcagagacatcaagaaataacgccggaacattagtgcaggcagcttccacagcaatggcatcctggtcatccagcggatagttaatgatcagcccactgacgcgttgcgcgagaagattgtgcaccgccgctttacaggcttcgacgccgcttcgttctaccatgctcaccaccacgctggcacccagttgatcggcgcgagatttaatcgccgcgacaatttggctcggcgcgtgcagggccagactggaggtggcaacgccaatcagcaagctctgtttgcccgccagttgttgtgccacgcggttgggaatgtaattcagctccgccatcgccgcttccactttttcccgcgttttcgcagaaacgtggctggcctggttcaccacgcgggaaacggtctgataagagacaccggcatactctgcgacatcgtataacgttactggtttcacattcaccaccctgaattgactctcttccgggcgctatcatgccataccgcgaaaggttttgcgccattcgatggtgtcaacgtaaatgcatgccgcttcgccttccggccaccagaatagcctggctttcaaccccttcttcgatctgttttgctacccgttgtagcgccggaagatgcttttccgctgcctgttcaatggtcattgcgctcgccatatacaccagattcagacagccaatcacccgttgttcactgcgcagcggtacggcgatagaggcgatcttctcctcctgatcccagccgcggtagttctgtccgtaaccctctttgcgcgcgcgcgccagaatggcttccagctttaacggttcccgtgccagttgatagtcatcaccggggcgggaggctaacatttcgattaattccttgcggtcttgttccgggcaaaaggccagccaggtcaggccgctggcggttttcagaagcggcaaacgtcgcccgaccattgcccggtgaaaggataagcggctgaaacggtgagtggtttcgcgtaccaccattgcatcaacatccagcgtggacacatctgtcggccataccacttcgcgcaacagatcgcccagcagtggggccgccagtgcagaaatccactgttcgtcacgaaatccttcgcttaattgccgcactttgatggtcagtcgaaaactatcatcggaggggctacggcggacatatccctcttcctgcagcgtctccagcagtcgccgcacagtggtgcgatgcaggccgctgagttccgccagcagcccgacgctggcaccgccatcaagtttatttaacatatttaataacattagaccgcgggttaagccgcgcacggttttgtattccgtctgctcattgttctgcatattaatactcatttctatagttaaaacaacgtggtgcacctggtgcacattcgggcatgttttgattgtagcgctaaacacccttcctatactgagcgcacaataaaaaatcatttacatgtttttaacaaaataagttgcgctgtactgtgcgcgcaacgacattttgtccgagtcgtgaggtactgaaatggcaatacaacaccctgacatccagcctgctgttaaccatagcgttcaggtggcgatcgctggtgccggcccggttgggctgatgatggcgaactatctcggccagatgggcattgacgtgctggtggtggagaaactcgataagttgatcgactacccgcgtgcgattggtattgatgacgaggcgctgcgcaccatgcagagcgtcggcctggtcgatgatgttctgccgcacactacgccgtggcacgcgatgcgttttctcaccccgaaaggccgctgttttgctgatattcagccaatgaccgatgaatttggctggccgcgccgtaacgcctttattcagccgcaggtcgatgcggtgatgctggaaggggtgagccgttttccgaatgtgcgctgcttgttttcccgcgagctggaggccttcagtcagcaagatgacgaagtgaccttgcacctgaaaacggcagaagggcagcgggaaatagtcaaagcccagtggctggtagcctgtgacggtggagcaagttttgtccgtcgcactctgaatgtgccgtttgaaggtaaaactgcgccaaatcagtggattgtggtagatatcgccaacgatccgttaagtacgccgcatatctatttgtgttgcgatccggtgcgcccgtatgtttctgccgcgctgcctcatgcggtacgtcgctttgaatttatggtgatgccgggagaaaccgaagagcagctgcgtgagccgcaaaatatgcgcaagctgttaagcaaagtgctgcctaatccggacaatgttgaattgattcgccagcgtgtctacacccacaacgcgcgactggcgcaacgtttccgtattgatcgcgtactgctggcgggcgatgccgcgcacatcatgccggtatggcaggggcagggctataacagtggtatgcgcgacgcctttaacctcgcatggaaactggcgttggttatccaggggaaagcccgcgatgcgctgctcgatacctatcaacaagaacgtcgcgatcacgccaaagcgatgattgacctgtccgtgacggcgggcaacgtgctggctccgccgaaacgctggcagggtacgttacgtgacggcgtttcctggctgttgaattatctgccgccagtaaaacgctacttcctcgaaatgcgcttcaagccgatgccgcaatattacggcggtgcgctgatgcgtgagggcgaagcgaagcactctccggtcggcaagatgtttattcagccgaaagtcacgctggaaaacggcgacgtgacgctgctcgataacgcgatcggcgcgaacttcgcggtaattggctggggatgcaatccactgtgggggatgagcgacgagcaaatccagcagtggcgcgcgttgggcacacgcttcattcaggtggtgccggaagtgcaaattcataccgcacaggataaccacgacggcgtactacgcgtgggcgatacgcaaggtcgcctgcgtagctggttcgcgcaacacaatgctagcctggtggtgatgcgcccggatcgctttgttgccgccaccgccattccgcaaaccctgggcaagaccctgaataaactggcgagcgtgatgacgctgacccgccctgatgccgacgttcctgtcgaaaaggtagcctgatatgcacgcttatcttcactgtctttcccacagcccgctggtggggtatgtcgacccggcgcaagaggtgctcgatgaggtcaatggcgtgattgccagcgcccgcgagcgtattgcggcattctcccctgaactggtggtgctgtttgcgccagatcactacaacggctttttctatgacgtgatgccaccgttctgtttaggcgttggagcgacggcaattggtgatttcggcagtgcggcaggagagctgcccgtgcctgtggagctggcggaggcctgtgcgcatgccgtcatgaagagcgggatcgatcttgccgtttcttactgtatgcaggtggaccacgggttcgcccagccgctggagttcctgctcggtgggctggataaggtgccagttctgcctgtgttcatcaacggtgtcgccacgccgctgcccggtttccagcgtacccgcatgttgggtgaagccattggacgtttcaccagcactctcaataaacgcgtgctgttcctgggttccggtgggctttcccatcagccgccggtgcccgaactggcgaaagccgatgcccatatgcgcgaccgtctgttggggagcgggaaagatttacccgccagtgagcgcgaattgcgtcagcaacgggtgattagcgccgctgagaagtttgttgaggatcagagaacgctgcatccgctcaacccgatttgggataaccagttcatgactttgctggagcagggacgcatacaggaactggatgccgtcagtaacgaagagctttccgccattgccggaaagagcacacatgaaatcaaaacctgggtcgccgcttttgccgctatttctgcgtttggcaactggcgtagcgaagggcgttattaccgcccaatcccggagtggattgccggatttggcagcttaagcgccagaacagagaactgaatatgcaggagaagatgatgagttatcagccacaaaccgaagccgccaccagccgttttctgaatgtagaagaagcgggtaaaacgctgcgcatccattttaatgactgcggacaaggcgacgaaaccgttgtcctgctgcatggttccggcccgggtgctactggctgggcgaacttcagccgcaatatcgatccgctggtagaggcgggctatcgggtgatcctgctggattgtccgggttggggcaagagcgatagcgtcgttaatagtggtagccgaagcgatcttaatgcacgaatcctgaaaagcgtggtggatcaactggatatcgccaaaatccacctgctgggcaacagcatggggggccatagttctgtggcgttcacccttaaatggccggagcgcgtcggcaaactggtgctgatgggcggcggtacgggcggcatgagtttgtttacgccgatgccaaccgaaggtattaagcgactgaatcagctttatcgtcagccgactatcgaaaacctgaagctgatgatggatatcttcgtttttgataccagcgatttgaccgacgccctgtttgaagcgcgcctgaataatatgctgagccgccgcgatcacctggaaaacttcgttaagagcctggaagctaatccgaaacagttcccggattttggcccacgtctggcggaaatcaaagcgcaaaccctgattgtctgggggcgcaacgaccgctttgtgccgatggatgcgggtctgcgtctgctgtccggcattgccggttctgaactgcatatcttccgcgactgtggtcactgggcgcagtgggaacatgccgacgctttcaatcaactggtgctgaatttcctcgcacgcccttaaggaatggtcatgacgaagcatactcttgagcaactggcggcggatttacgccgcgccgcagagcagggcgaagcgattgcaccgctgcgcgatctgattggtatcgataacgctgaagcggcttacgccattcagcacataaatgtgcaacatgacgttgcgcaggggcgtcgcgtggtagggcgtaaagtgggcctgacacatccgaaagtgcaacaacaactgggcgttgatcaaccggattttgggacgttatttgccgacatgtgttatggcgataacgaaatcattcctttttcccgtgttctgcaaccccgcattgaagcggagatcgcactggtgttgaaccgcgatttgcccgcaaccgatatcaccttcgacgaattgtataacgccattgaatgggtacttccggcgctggaagtggtggggagccgcattcgcgactggagcattcagtttgtcgataccgtggcagataacgcctcctgtggggtgtatgtcatcggcggtccggcgcaacgtccggcggggttagacctgaaaaactgcgccatgaagatgacgcgtaataacgaagaggtttctagcgggcgcggcagcgaatgcctgggacatccgcttaatgcggccgtctggctggcacgcaaaatggccagtctgggtgaaccgctgcgcaccggagatatcattcttaccggggcattaggtccgatggtggcggtgaatgcgggcgatcgttttgaagcccatattgaaggcataggtagtgttgctgcgacatttagtagcgcagccccaaaaggaagtctgagttgagctaagccccaaaaggaagtctgtcatgagtaagcgtaaagtcgccattatcggttctggcaacattggtaccgatctgatgattaaaattttgcgtcacggtcagcatctggagatggcggtgatggttggcattgatcctcagtccgacggtctggcgcgcgccagacgtatgggcgtcgccaccacccatgaaggggtgatcggactgatgaacatgcctgaatttgctgatatcgacattgtatttgatgcgaccagcgccggtgctcatgtgaaaaacgatgccgctttacgcgaagcgaagccggatattcgcttaattgacctgacgcctgctgccatcggcccttactgcgtgccggtggttaacctcgaggcgaacgtcgatcaactgaacgtcaacatggtcacctgcggcggccaggccaccattccaatggtggcggcagttagtcgcgtggcgcgtgttcattacgccgaaattatcgcttctatcgccagtaaatctgccggacctggcacgcgtgccaatatcgatgaatttacggaaaccacttcccgagccattgaagtggtgggcggcgcggcaaaagggaaggcgattattgtgcttaacccagcagagccaccgttgatgatgcgtgacacggtgtatgtattgagcgacgaagctagtcaagatgatatcgaagccagtatcaatgaaatggctgaggcggtgcaggcttacgtaccgggttatcgcctgaaacagcgcgtgcagtttgaagttatcccgcaggataaaccggtcaatttaccgggcgtggggcaattctccggactgaaaacagcggtctggctggaagtcgaaggcgcagcgcattatctgcctgcctatgcgggcaacctcgacattatgacttccagtgcgctggcgacagcggaaaaaatggcccagagtctggcgcgcaaggcaggagaagcggcatgaacggtaaaaaactttatatcagcgacgtcacattgcgtgacggtatgcacgccattcgtcatcagtatagcctggaaaacgttcgccagattgccaaagcactggacgatgcccgcgtggatagcattgaagtggcccacggcgacggtttgcaaggttccagctttaactatggtttcggcgcacatagcgaccttgaatggattgaagcggcggcggatgtggtgaagcacgccaaaatcgcgacgttgttgctgccaggaatcggcactattcacgatctgaaaaatgcctggcaggctggcgcgcgggtggttcgtgtggcaacgcactgtaccgaagctgatgtttccgcccagcatattcagtatgcccgcgagctcggaatggacaccgttggttttctgatgatgagccatatgaccacgccggagaatctcgccaagcaggcaaagctgatggaaggctacggtgcgacctgtatttatgtggtggattctggcggtgcgatgaacatgagcgatatccgtgaccgtttccgcgccctgaaagcagagctgaaaccagaaacgcaaactggcatgcacgctcaccataacctgagtcttggcgtggcgaactctatcgcggcggtggaagagggctgcgaccgaatcgacgccagcctcgcgggaatgggcgcgggcgcaggtaacgcaccgctggaagtgtttattgccgccgcggataaactgggctggcagcatgggaccgatctctatgcgttaatggatgccgccgacgacctggtgcgtccgttgcaggatcgaccggtacgagtcgatcgcgaaacgctggcgctgggatacgctggtgtttacagcagcttcctgcgtcactgtgaaacggcggcggcgcgttatggcttaagtgcggtggatattctcgttgagctgggcaaacgccggatggttggcggccaggaggatatgatcgttgacgtggcgctggatctgcgcaacaacaaataatgatgactgccgagaacgtgcattttgtatgcccatcccagcacgactgccggatgcggcgtgaacgccttatccggcctacggatggcgtgagaatttgtaggtctgataagacgcgttagcgtcgcatcaggcatctgcgcacgactgccggatgcggcgtgaacgccttatccggcctacggatggcgcgggaatttgtaggcctgataagacgcgttagcgtcgcatcaggcatctgcgcacgactgccggatgcggcgtgaacgccttatccggcctacgggtggcgcgagaatttgtaggcctgataagacgcgttagcgtcgcatcaggcatctgcgcacgactgccggatgcggcgtaaacgccttatccggcctacggatggcgcgggaatttgtaggcctgataagacgcgttagcgtcgcatcaggcatctgcacacgactgccggatgcgataaacgtcttgtccggcctacatttcgcccgtaggcagtcattaaatagttctgattacgcggctggcaatgtatcagtcgcgattcacctgcactcgcaacgaggttcatcttatgagcactcgtacccctagtagttctagttcccgcctgatgctgaccatcgggctttgttttttggtcgctctgatggaagggctggatcttcaggcggctggcattgcggcgggtggcatcgcccaggctttcgcactcgataaaatgcaaatgggctggatatttagcgccggaatactcggtttgctacccggcgcgttggttggcggaatgctggcggaccgttatggtcgcaagcgcattttgattggcagtgttgcgctgtttggtttgttcagtctggcaacggcgattgcctgggatttccccagtctggtctttgcgcggctgatgaccggtgtcgggctgggggcggcgttgccgaatcttatcgccctgacgtctgaagccgcgggtccacgttttcgtgggacggcagtgagcctgatgtattgcggtgttcccattggcgcggcgctggcggcgacactgggtttcgcgggggcaaacttagcatggcaaacggtgttttgggtaggtggtgtggtgccgttgattctggtgccgctattaatgcgctggctgccggagagcgcggttttcgctggcgaaaaacagtctgcgccaccactgcgtgccttatttgcgccagaaacggcaaccgcgacgctgctgctgtggttgtgttatttcttcactctgctggtggtctacatgttgatcaactggctaccgctacttttggtggagcaaggattccagccaagccaggcggcaggggtgatgtttgccctgcaaatgggggcggcaagcgggacgttaatgttgggcgcattgatggataagctgcgtccagtaaccatgagcctactgatttatagcggcatgttagctagcctgctggcgcttggaacggtgagcagttttaacggtatgttgctggcgggatttgtcgcggggttgtttgcgacaggtgggcaaagcgttttgtatgccctggcaccgttgttttacagtagccagatccgcgcaacaggtgtgggaacagccgtggcggtagggcgtctgggggctatgagcggtccgttactggccgggaaaatgctggcattaggcactggcacggtcggcgtaatggccgcttctgcaccgggtattcttgttgctgggttggcggtgtttattttgatgagccggagaagtcgaatacagccgtgcgccgatgcctgacgtgccttattaggcaggggcgaaagggacttcaccccaatacacctacggcgtttacaggtatactcgctaaaaattattcagcgggtttggaaacaaagatggcaaaacttaccttacaagagcagttgctcaaagcaggattagtcaccagcaaaaaagcggcgaaggtggagagaacggcgaaaaaaagccgcgttcaggcgcgtgaagctcgggcggcggtagaagaaaataaaaaggcacagcttgagcgtgataaacagcttagcgaacagcaaaaacaagcggcgttggcgaaagaatataaagctcaggtgaagcagcttattgaaatgaaccgaatcaccattgccaatggcgatattggttttaacttcactgacggcaatctgattaagaagatttttgtcgataagctcacacaggcgcagttgattaatggtcgtctggcgattgcccgcttgttggtcgataacaatagcgaaggtgaatacgccattattcccgccagcgttgccgataaaattgctcagcgcgatgccagcagtatagcgttgcacagcgcgctcagcgccgaagagcaggatgaagacgacccgtatgccgacttcaaagtgcctgatgatttgatgtggtaaacatagataagtcgtgcgcagatgcctgatgcgacgctatgcgcgtcttatcaggcctacggtttatgggcgaagtgtagaccggataaggcgttcacgccgcatccggcagtcgtgcgccatgcctgatgcgacgctttgcgcgtcttatcaggcctacggcttacgggcgaagtgtaggccggataaggcgttcacgccgcatccggcagtcgtgctattatcaacgcatattcagtttattggcgtggtaggcaatatgctcgccaataaaactggagacaaaataatagctgtgatcataaccctcgtgataacggattaacgtcttgatattcatctcctggcagatcttttcaagatttggagtccgcagctgttctgcgtaaaaatcatcactcaacccctgatcaaccatgatttccgcaacgcgttgaccttgactaataagactcaccgggtcgtaatccaaccaggcatctttattttcagcaagatatgcagcaaaggcttgctgtccccacggcacttggcttggggagacaatggggctaaacgcgctgacgctgacatattcatctgggttacgtaacgccagcaccagcgcgcccagcccgcccatagaatgaccagagatagactttttggccgttgccggaaaatgatgcatcactaaatccggcagctcgttgcggatatagtcatacattttgtaatgttcattccacggcgcttgcgtcgcgttcaggtaaaacccggcaccttgcccgagatcgtaacggtcagcatctgcgacatgactgcctcgcggactggtgtccggcgcaacaacaataatgttgtgctcagccgcgtaacgctgcatcccgcttttagtaatgaaattctgctcgttgcaggtcaggccactaagccagtacagcaccggcaatttttcattcgcggcttttggtgggagatagacgccgacattcatttcacatttcagactttgggaataatgccgatacatattttgccagccgccaaagctgacatgtttttcaatgagttccatcagtcattatctcagggttaatcccccggacggctgcccggggagagtattaagaacccccgcctgaagtggacggggtaaacctgcgggaaatcagtaacgaattacggttcgaatggatttgccttcatgcatcaggtcgaaggcgtcattaatttcatccaggctcatggtatgcgtgacaaacggttccagatcgatatcacctttcatcgcatcttcaaccatgcccggtaactgggaacgacctttcacgccgccaaacgcggaacctttccatacgcgaccagtgaccaactggaatggacgggtggagatttcctgaccggcaaccgcgaccccgatgatcacgctctgaccccagccgcggtgcgcactttccagcgccgcacgcatcacgttgacgttaccgatgcattcaaaggtatggtcgataccccatttgttgatatccaacaggacatcttttatcggtttgtcgtagtcattcgggttaatgcagtcggtagcaccgaagcgacgcgccagatcgaatttcttcgggttggtatcgatagcgataatccgacccgctttcgcctgacgcgcgccctgaaccactgccagaccaatcgcgccaagaccaaacacggcaacagaatcacctggctggactttagctgtgttgtgtaccgcgccaataccggtggtcacgccacagcccagcaggcagacgtgttcatggtttgcttctggattaatttttgccagagacacttccgcgactacggtgtattcactgaatgtagagcaccccatgtagtgataaagcggctgcccgttgtaagaaaaacgggtggtgccgtctggcatcaggcctttaccctgggtttcgcgaaccgcaacacagaggttagttttgccagaacgacagaactcacactcgccgcactccgcggtgtaaagcgggatcacatggtcgccaggtttgacgctggttacgccttcaccgacttcaaccacaacgccggccccttcgtgaccgagaaccaccgggaatacaccttccgggtcatcgccggagagggtaaatgcgtcggtatggcaaacgccggtatgggtgactttaattagcacttcaccttttttcggtggtgcaacgtcaatttcaacgatttccagcggtttaccgggagcaaatgcaacggcagcacgacttttcatctctcgctcttcctcaatatggtaatagattcagttatttaagataggcacgaaccagttcaatagtgtcgtcaacggattggctgacttcgcggctgtagcagtcatttcggtcaaacgtttcccggatatggctttcaagcacttctgccatcagcccattagccgcgccccgaacggcagcgatctgttggagtatggcacggcattcggcatcaccctccaggctccgttccagagcatcaatctgcccccgaatacgacgaactcgagtaaggacctttttcttctcttccggagtactgggcatttcgcacctcatcatctgcatgcaatatactataggggggtattctatatgtcaatgcatacccccctatagtatataacactggagaataaaatttatccggtgaatgtggtcggaaaacaaagaggaaaggggggggctaatcggcagggaaggccgccccggatagcgggcggcagaaggaatcagaatttccaggtcagacgggctgcaagttgcagaccgttacgagatggacggtcccctcgcccccttggggagagggttagggtgagggggcgttcaccgtactttcaacaggttaactccccctttctgagaggaaacaaaattaacgcagaatcttcttctcagccaaatccagcgcaaagtagctgaaaatcagatccgcacccgcacgcttaatgctacctaagctttcgagcacgactttctcttcatctatagcacccgccagcgcggcgaacttaatcatcgcatactcaccgctcacctgatacgcgccaatcggcaattcagtacgttcacgcagctcacgcacgatgtcgaggtacgctccagcaggtttaaccatcaggcagtctgcgccctgggcttcatccagcagactttcacgaatcgcctcacgacggttcattgggttcatctgatagcttttgcggtcgccttttaatgcgcttccggcagcttcacggaacgggccataaaaggaggaggcgaacttggtgctatagctcataatcgccgtatctttaaatcccgcagcgtccagcgcctgacgaatcgcctgtacctggccgtccatcgcggcggaaggggcgatgaagtctgcacctgcagcagctgcaaccacggcttgcttgcctaaattttccagagtcgcgtcgttgtcgacgccatgctcgcacagcacaccgcagtgaccgtgagaagtgtattcacagaagcaggtgtcactcataacgatcatttctggcacggtctgcttgcagatgcggctcatacgcgccaccagtccatcttcccgccaggcatcgctgccggtttcatcggtatggtgagagatgccaaaagtcatcacggaacgaataccggcgttggcgatgcgttcaatttcgcgtgccagatgtttctctggaatgcgcatcacgcctggcatggcttcaacggctttgtagtcgtcaatttcttcttcaacaaagatcggcaacaccaggtcgttaaggctaagtgttgtctcttcaaacatagcgcgcagcgcaggagatttgcgcaggcgacgagggcgttggattaagtctgtcatggtctgcctgatgtttgtggaatcgaggggcatagtatacctgaagcagggtagggatgttttacgaaagttgtcgcgatgttgacaagaagagaatggaagagaggccaggacatctttttaatagaaacagcaataattttatattcactgaaaatatttttaatcttgaatattatcgggcgttaaaatattacattgtggttttcaatgcgttatccgcagcgtgacgctccagcgccagttcaatcaaacgtgtgatcagatcggtgtaacccagaccgctggcttgccacagcttcggatacatactgatattagtgaagccaggcagggtgttgatctcgttgatcaccacttcgttctctggggttaaaaacacgtctacacgcgccatgcctgcgcatcccaacgtttgataagcctgaacggcaatcgcccggatcttatcgttgatttctggcgcaatggctgccggaactaccactttcgcgccatcttcgtcaatgtacttggtgtcgtaggcatagaaatcgctggtgagtacgatctctccacaggtgctggcttgcggattgtcgttgcccagaactgcgcattcgatctcacgacctttgatcccttgctcaacgatcactttatgatcgaactcgaacgccagatcgacggcaattgcgtactgttcttcactggttactttgctgacaccaacagaagagccctgattagccggttttacaaacagtggtaaccccagtttagactccacttcggcaaaactaatgttgtgacgattggcgcgcgtcagggtaataaatggcgcaatgttcagcccggcatcgcgtagcagacgtttggtgacatctttgtccatacaggctgcactagccagaacatcagaacctacaaacggtaaattggcgacccgcagcattccctgcaaggaaccatcttcgcccagcgtaccgtggacaatcgggaaaatgacatccaccgtcggcaacggctgaccgttttgcgcgtcgataagctgatgctcatgtttacctggcacctgcgcaaggctggtcgcgctagggcgcaacgcaatatgggcaggatcgtctgcatttagcagataattgctggcatcgctgacgtgccattgcccttgtttatcaatgcccagcagcacaacgtcgaagcgacttttatcaatggcatcgacaatgttttttgcgctttgcagagacacttcatgttccgcacttttaccaccaaaaacgattcctacccgcagtttttccatcttaaaaacctatcccgtctaacacaaagtgcatacattaccacgacaaaacgggggattcgcggccttctgaaagattgttgcaatcttctgctgacaaagcgtgcaacgtactggtgaagaaagtgcgttatctcaaagatgtgcgcaagatcacaaaaatgatgaacgggaagctaatttattcctggcttaaatggccatgcggtgagtttttttctcttaattataagttaacgaagagaatatatttcataacttttatttataataaaggttgataattaaaagcctatattttgtgtgggtaattatttaaataagagaaacgtttcgctggtaatcaaacaaaaaatatttgcgcaaagtatttcctttgtcataaaaataatacttccagacactatgaagttgtgaaacataatgttaacttctccatactttggataaggaaatacagacatgaaaaatctcattgctgagttgttatttaagcttgcccaaaaagaagaagagagcaaagaactgtgtgcgcaggtagaagctttggagattatcgtcactgcaatgcttcgcaatatggcgcaaaatgaccaacagcggttgattgatcaggtagagggggcgctgtacgaggtaaagcccgatgccagcattcctgacgacgatacggagctgctgcgcgattacgtaaagaagttattgaagcatcctcgtcagtaaaaagttaatcttttcaacagctgtcataaagttgtcacggccgagacttatagtcgctttgtttttattttttaatgtatttgtacatggagaaaataaagtgaaacaaagcactattgcactggcactcttaccgttactgtttacccctgtgacaaaagcccggacaccagaaatgcctgttctggaaaaccgggctgctcagggcgatattactgcacccggcggtgctcgccgtttaacgggtgatcagactgccgctctgcgtgattctcttagcgataaacctgcaaaaaatattattttgctgattggcgatgggatgggggacagcgaaattactgccgcacgtaattatgccgaaggtgcgggcggcttttttaaaggtatagatgccttaccgcttaccgggcaatacactcactatgcgctgaataaaaaaaccggcaaaccggactacgtcaccgacagcgctgcaagtgcaaccgcctggagtaccggtgtcaaaacctataacggcgcgctgggcgtcgatattcacgaaaaagatcacccaacgattctggaaatggcaaaagccgcaggtctggcgaccggtaacgtttctaccgcagagttgcaggatgccacgcccgctgcgctggtggcacatgtgaccagccgcaaatgctacggtccgagcgcgaccagtgaaaaatgtccgggtaacgctctggaaaaaggcggaaaaggaagcattaccgaacagctgcttaacgctcgtgccgacgttacgcttggcggcggcgcaaaaacctttgctgaaacggcaaccgctggtgaatggcagggaaaaacgctgcgtgaacaggcacaggcgcgtggttatcagttggtgagcgatgctgccagtctgaatagcgtgacggaagcgaatcagcaaaaacccctgcttggcctgtttgctgacggcaatatgccagtgcgctggctaggaccgaaagcaacgtaccatggcaatatcgataagcccgcagtcacctgtacgccaaatccgcaacgtaatgacagtgtaccaaccctggcgcagatgaccgacaaagccattgaattgttgagtaaaaatgagaaaggctttttcctgcaagttgaaggtgcgagtatcgataaacaggatcatgctgcgaatccttgtgggcaaattggcgagacggtcgatctcgatgaagccgtacaacgggcgctggaattcgctaaaaaggagggtaacacgctggtcatagtcaccgctgatcacgcccacgccagccagattgttgcgccggataccaaagctccgggcctcacccaggcgctaaataccaaagatggcgcagtgatggtgatgagttacgggaactccgaagaggatagtcaagaacataccggcagtcagttgcgtattgcggcgtatggcccgcatgccgccaatgttgttggactgaccgaccagaccgatctcttctacaccatgaaagccgctctggggctgaaataaaaccgcgcccggcagtgaattttcgctgccgggtggtttttttgctgttagcaaccagacttaatggcagatcacgggcgcatacgctcatggttaaaacatgaagagggatggtgctatgaaaataacattactggttaccttgcttttcggtctggtttttttaaccaccgtcggcgctgccgagagaactttaaccccacaacaacagcgtatgacctcctgtaatcagcaggcgacggcgcaggcgttgaaaggggatgctcgtaagacctacatgagtgattgcctgaagaacagcaagtctgcgcctggcgaaaaaagtttgacgccacagcagcaaaagatgcgcgaatgcaataatcaagcaacacaacaatctctgaaaggtgatgatcgtaataagtttatgagtgcctgcctcaagaaagccgcctgatacctgatagtgctaacgggtgagctacgaaaatggctcacccgaaatatcatacttctgcctttagctccgtctctataatttgggaaaattgtttctgaatgttcccaaaaataatgaatgatgaaaactttttcaaaaaagcggcggcgcacggggaggaacctcctttaactcctcaaaacgaacatcagcggtccgggctgcgcttcgcccgtcgcgtcagactaccccgtgcggttggcctggctggcatgttcttaccgattgctagtacgctggttagtcacccgccgccgggctggtggtggctggtgttggtcggctgggcgttcgtctggccgcatttagcctggcagatagcgagcagggccgtcgatccgcttagccgggaaatttacaacttaaaaaccgatgcagtattagcgggaatgtgggtaggcgtaatgggcgtaaacgtgctgccttccaccgcgatgttgatgattatgtgtctgaatttgatgggggcaggcggcccccgtctgtttgtcgcgggtctggtgttgatggtggtttcctgccttgtcaccctcgagctgacgggcattaccgtgagcttcaatagtgcgccgctggaatggtggctctcccttcccattattgtcatttatcctctgctgtttggctgggtcagctaccagacggcaaccaaactggcggaacataaacgcaggttgcaggtcatgagtacccgcgacggcatgacgggcgtgtataaccgacgtcattgggaaactatgttacgcaatgaatttgataactgtcggcggcataatcgcgatgcaacgttactgattatcgatatcgaccatttcaagagcatcaacgatacctggggccatgatgtgggcgatgaagcgattgtggcgcttacccgacagttacaaattgccctgcgcggtagcgatgtgattggtcggtttggcggcgatgagtttgcagtaatcatgtccggtacgccagctgagagcgccattaccgccatgttacgggtgcatgaagggctaaatacattacgtttgccgaatacgccacaggtaactttacggattagtgtgggggttgcgccgctgaacccacaaatgagtcactatcgtgagtggttgaaaagcgcagatttggcgctttacaaagcaaagaaagccggacgtaaccgcaccgaagtggcggcctgacgtccggcgaaagtcatcaggatttgctgagtttttcacttttttccatacacttcgtcatcgcttcgatcactgcagcacggaagcctttctcttccagtacgcgtaccgcttcaatggtggtgcctcccggactgcagaccatatctttcagtgcccccggatgttctcccgtttccagcaccatttttgcggaacccattaccgcctgagcggcaaatttatacgcctgggcgcgtggcatcccgcccagcacggcggcgtcggccatcgcttcgataaacataaatacgtaggctgggctagaaccgctcacaccgaccaccgggtggatcatcggctcagcaattacttccgcttcgccaaagcagcggaaaatattcagcacatcagcggtatcttctggggttaccagcgcgtttggcgttacggaggtcatcccggcattaaccagtgcgggagtgttcggcatggcgcggataattttccggtcatggcccagcgcgcgggcaagctggtcgagcgtgacacctgcagcaatagaaacgaccagagagtctttattcaggctggaggtgatttcgctaagcactttaatcatgatgccaggtttaacggcagcaaaaatgatgtcggcgatttgcgccacttcttgcgcgctttctgcggcgttgatgccgaactggtcatgcagggcggcgactttatccggggagggggtgtatacccagatttgccctggaagcacctgaccgctggcaatcagaccgccgagaatggcttttcccatattgccgcagccaataaaaccgattttcttttccattgcctcactcctgccgtgaaattcattgttttgataatcgctggcagaagcataaacagaactatgccggaaggcaaaagcgcgacacaatagaggattacccaacaaaggatgactttatgacaatttgggtggatgccgacgcgtgtcccaatgtaattaaagagattttgtatcgcgcggcggaacgtatgcagatgccgctggtactggtagcaaaccagagtttacgcgtgccgccaagccgatttattcgtacgctgcgcgtcgcggcaggtttcgacgttgccgataacgaaattgtccggcagtgtgaagcgggcgatttggtgatcaccgcagatatacctttggctgctgaagccatcgagaaaggcgctgcggcgcttaatccgcgcggcgaacgttacacgccagcgaccattcgtgagcgcctgacgatgcgcgattttatggataccttacgtgccagtgggatccagaccggcggaccagatagccttagtcaacgtgaccgccaggcctttgccgcggagctggagaagtggtggctggaagtgcaacgtagtcgtggctaaatgtaatttattatttacacttcattcttgaatatttattggtatagtaaggggtgtattgagattttcactttaagtggaattttttctttacaatcgaaattgtactagtttgatggtatgatcgctattctcatgacaccggctttcgccgcattgcgacctattggggaaaacccacgatgacacaacctctttttctgatcgggcctcggggctgtggtaaaacaacggtcggaatggcccttgccgatagccttaaccgtcggtttgtcgataccgatcagtggttgcaaagtcagctcaatatgacggtcgcggagatcgtcgaaagggaagagtgggcgggatttcgcgccagagaaacggcggcgctggaagcggtaactgcgccatccaccgttatcgctacaggcggcggcattattctgacggaatttaatcgtcacttcatgcaaaataacgggatcgtggtttatttgtgtgcgccagtaagtgtcctggttaaccgactgcaagctgcaccggaagaagatttacggccaaccttaacgggaaaaccgctgagcgaagaagttcaggaagtgctggaagaacgcgatgcgctatatcgcgaagttgcgcatattatcatcgacgcaacaaacgaacccagccaggtgatttctgaaattcgcagcgccctggcacagacgatcaattgttgattttcgagcgcctatacttaacgttcatcccgtgaaataaggaagaacgatgccaacgaaaccgccttatcctcgtgaagcatatatagtgacgattgaaaaaggaaagccaggacagacggtaacctggtaccaactcagagccgatcatcctaaaccagacagcttgatcagtgaacatccgaccgctcaggaagcgatggatgcgaaaaaacgctatgaggaccctgacaaagagtgaccgcatcagactgctcggaagggattctgagtgccactacaagggatctgcgtcacatttttcataattcatgtttttctaataattagaatattaaacaataacaatccattactggaatcatttggaatctttacattatgccgtgcacgtctgctgctacgctttttgtcatttgtagcacaagtaagtgtcagcagtggtgcttcacacttgcccggtaattaacgacgaaagaaaagtaaggtggatgaacaatgagtgcgagcttggcgatcctgaccatcggcattgtacctatgcaggaagttttgccgctcctgacggaatacattgacgaagataatatttcccatcatagcctgctggggaagttaagtcgtgaagaagtgatggcggagtacgcgccagaagcaggcgaagacaccattctcacattattaaatgacaaccagctggcccatgttagccgtcgcaaagtggagcgtgacctgcaaggtgtggttgaagtgctcgataatcagggttatgacgtcattttattaatgagtacagcaaacattagtagtatgactgcgcgtaatacgatctttcttgagccgagccgaatattgcctccactggtttcctctattgttgaagatcatcaggtgggggttatcgttccggttgaggagatgctgcccgttcaggcgcaaaaatggcaaattttgcagaaaagcccggtatttagtttgggtaaccccattcatgatagtgaacaaaaaatcattgatgccgggaaagaattactggcaaaaggggctgatgtcatcatgctggattgtttaggatttcaccaacgtcatcgcgatttactgcaaaaacagctcgatgttcctgtcttgctgtctaacgtattgattgcacggctggctgcggaattactggtgtaattttgcgtgacagccagcgcctctggcccctatagtgaagtagatgttcaactaccaaacagggccagtttatgcttcaaagtaatgagtacttttccggcaaagtgaaaagtatcggcttttccagcagcagcactggtcgcgccagcgtgggtgttatggttgaaggcgaatacaccttcagcaccgctgagccggaagagatgacggtaatcagtggcgcgctgaatgtgttactgcctgacgcgaccgactggcaggtgtatgaagccggtagcgtgtttaatgttcccggtcacagtgagtttcatctgcaagttgccgaacccacctcttatctgtgccgctatctgtaattcctcgccttccccttgaacgggagggcatttttctgaaatatcctttctttagcccataataatatttcctttgctgcgattttttcaatttccgatatattcataatttatcaaggttgatataaatatcagtgaagatctccagatattgttgcggaactggctacgataaaagataaatcagatgatgaatggtggcgtgcattgctgcaaagtcgcaatgatcatttacgccaaacggcattgcgcaacgcacataccccggcgttgttgttaacgacattgactgagcctcaggatcggagcctggctattaataatccacagctggctgccgatgtgaaaacggcgtggttaaaagaggatccaagtttactcttatttgtcgaacaacccgatcttagcctgttacgtgatttagtgaaaaccggggcaacgcggaaaattcgcagtgaagcgcgtcaccggcttgaggaaaaacaatgacacaacgtccatggagcaagttacagcgtaaaacgcataatattgctgcgctaaaaattattgctcgccgtagcgaataattatatgcctggtgtggcttcgtacgccggataagacgcggcaggcgtcgcatccggcattaaaggaaaatcagcaattaacgttgtgcttcgccacctaatccttcaatcaggttttgaattaacgctgccagttcaccagtcatcaggatgaaatcggcatcaaaacgctgggcgaaatcttcacggtcgatatcttcgttttgatcgcgcagctcgtcgcagaacttcagacgcttgaggctaccatcgtcgcacatcacaaactgaatgcgctgctgccagtcgagcgccagtttagtcaccacttttccggcttcaatgtgattggtgatctcttcgctggtcagatcttgtttcttcgcgcggatcacgccgccatcttccagcaagcttttcagctcggcttcatcaagcagctggaagccctgtgccgcactgccggagcgaacccattcggtcagcgtcagttcaatcgggttttccatgctcaatggtacaaccggtaagctccccaggcttttacgcagtaatgccagcgtatcttccgcttttttggcactggcgcagtccaccataatcaaaccgttaaccgtgtcgatccacatcattgtctggctaaaacggctgaaagcacgcggcagcagagagtgcagcacttcgtctttcaggctatctttttcggttttcttcagcttacgcgcctgttccgcttccagtttggcgattttcgcttccagcgcctgtttaatcaccggagacgggaggattttttcttctttgcgcgcgcagataacaatttgaccattggcaacgtgcgttaacgcatcgctgtggcttcccatcggaggaacccagcccatcttcgccatgtcctggctgccgcatggggtaaatgccatgctggctagctgtttttccatctcttctgcacgcaggctaatctcgcggctaagacggtaaaccattaaatttttgaaccacagcatgataatttccacggccttgtcgttaaatttagcgggcatgataacgaattgtcggcggccttgcattgccaatccggttgtccgtctctacgctattgatattgaaaaaaataaggagagtaccgtgcgtataggtatcgatttaggcggcaccaaaactgaagtgattgcactgggcgatgcaggggagcagttgtaccgccatcgtctgcccacgccgcgtgatgattaccggcagactattgaaacgatcgccacgttggttgatatggcggagcaggcgacggggcagcgcggaacggtaggtatgggcattcctggcagtattagcccttacaccggtgtggtgaagaatgccaatagtacctggctcaacggtcagccattcgataaagacttaagcgcgaggttgcagcgggaagtgcggctggcaaatgacgctaactgtctggcggttagtgaagcagtagatggcgcggcagcgggagcgcagacggtatttgccgtgattatcggcacgggatgcggcgcgggcgtggcattcaatgggcgggcgcatatcggcggcaatggcacggcaggtgagtggggacacaatccgctaccgtggatggacgaagacgaactgcgttatcgcgaggaagtcccttgttattgcggtaaacaaggttgtattgaaacctttattagcggcacgggattcgcgatggattatcgtcgtttgagcggacatgcgctgaaaggcagtgaaattatccgcctggttgaagaaagcgatccggtagcggaactggcattgcgtcgctacgagctgcggctggcaaaaagcctggcacatgtcgtgaatattctcgatccggatgtgattgtcctggggggcgggatgagcaatgtagaccgtttatatcaaacggttgggcagttgattaaacaatttgtcttcggcggcgaatgtgaaacgccggtgcgtaaggcgaagcacggtgattccagcggcgtacgcggcgctgcgtggttatggccacaagagtaaaaaacgtaggcaattggcgcatcatgcctgatgcgacgcttgccgcgtcttatcaggcctacaaaaggtgccagaaccgtaggccggataaggcgttcacgccgcatccggcaataagtgctccgatgcctgatgcgacgcttgccgcgtcttatcaggcctgcaaaatgtgccagaaccgcgtagggcggataaggcgttcacgccgcatccggcaataagtaatgagcaccgagactataacttaccccagtggtttcgccagcaccggagtatccgccgcttgctggcgcttatagcgaccatacagcagcaagctgctcatcgcagcaaagctaagcagggcggcaggcagcgccacgtaattatatgccagccccagcgtcagcatcatacctccgcaatatgcgccgacggcgctaccgaggttaaacgctatttgcccacctgcggcacctaataactctccgcctttggcgttttgtagtaacaatatttgtagcggtgcactaagggcaaataatcccgcgcaacaaataaaagcaaaaataaggctcgttgttttcatgccgccgcagaaaaagagcatcagcagtgccagtacaattataaagtcagttactgctgcaatgcgcagtggactataacgtccactaatcctgccacttagcatatttcccagcaccatccctagcccaactaacatcataataaaggtcatcgccgtttcgctaaaaccggaaataaacatcatgtatggctttacgtagctgaaccaggcaaacacacctgcgttgccaaacatcgtggcggcgaaaattaaccacggggccgggctgcgcaaaaagtgaaattgttcgcgcagatttcctttcgcctcgtcgcgaatatctggcacccaaaaatagacgcttgccatcaccgcaatattaaaaacagcgatcaataaaaaggtgtaacgccagctaaattcctgacttaaatacgttcccagcggaatgcccagcaaattggcgactgtcatcccggaaaccatccccgccacggcggcggtgacttttccgggtttgataattttacttaacacgatcgctccgacgccaaaaaatgcgccatgcggaaagccggataccagccgaccaatggcgagcatcaggtaagagctagagagcgtgaacatggcgttgccaatgacgcacaacgccaccagaaacaacaagatatgtttgagactgtagcggctggaaaagagtgcgatgattggcgcaccgaccaccacccccagtgcataatagctgatcatatgcccggcggcaggaatgctaattcctacgttatgcgccagctccgtgagcacgcccataatgccaaattcggccatccccaaaccaaacgtgcccagagccaaagataaaatgacttttttcataccaccatcacaaccaccagaacggctaccaatcaccgtagccaataaagtgatagcttgcaggataacgaccagcaaggccaagagataattcgcccctctgtattcattatcctgctgaatagttatttcactgcaaacgtactttccagtttgctgtagcccaggccgttgatctttttcactttgatctgcaccggaatacgctctttcatcgcttctacgtggctaatcacaccgatggttttgccactggcgttcagggcatccagcgcatcaagggcggtatccagcgtttcgctatccagcgtgccaaaaccttcatcaaggaacaggctgtcaatacgtgttttatggctgaccagatcgctaagcgccagcgccagcgccagactaacgaggaaactttcgccgccggaaagggtacgggtatcgcgtaccgcatctgcctgccaggtatcaacaacctcgacttccagcgcctcgctggctttgcgctgtaacagatagcgcccgtgcagccgggtaagttgctgattagcgagatggactaaattatccagcgtcagcccctgggcaaacttgcggaatttatcgccctctttggaacctattaggctattcagatatccccagtcctcaacctgctgcgtcatttgagcaatttgctgcattaaggtttgttgttgctgacggttatctgcatcctgcttcagctgctggcgaatctcgccttgactcgtggtgttttcacgcaacttttggtgagtttgcgctaactcttgctgaatctgctccaccgtcacagtgagagccaacccgtcgtcaggtcggtgttgttgatgctgtgccagcgtttctgctgtctgagtgaccagagtttgcgcctgacggcgctggttttccagattctgcttgagctgttccagctgcgttagtgtttgttcatccattagcgccgcaaggaacgcctgctgatcgtcaaagacgctggcctgtagcgcggtgtcaaactgcgcctgggctttttgcagactttgcgccgccagaacatcctgttgctgtaacgtctgctgctggctgtgtaatgcgagacattgttcatgtacctgccgccagttttccaataccacagtttcttcgcagtgcgggagttcatcactttgcggcaacgtttccagaatcggcgtcagctgctgaatacggttttgcagcgcggttaattcgttctggcgttgctgccagctctgcgcttcttgctgacgtgtcgccaaccagctctcttcttcatcttcctgtggcaatgtcagtgcataacccgtcaatgtcgttaaaagtagttgctggcgttgttcaatttgctgttgatactggataatttgctgattatgcgcggcaatctgcccttgtaattcatgccgttggctgagtaaccgcagctggcgttcgtgctcatcttgtgcatccagccacggttgaatatcgtccagtggctgcaaggtgatattgaggctggccgtgacggcttgccattgttgagtaagtgcttgctcatcttgtcggaggctttgcgcttcgttttcatcacgctgaagctgctttgttatggcgtccagttgcccacgtagcgtcgcaccttcttcaccgagctttttaacttcgttttccagcgccagtaatcgagactgattaacgccaggctccagcgcctgatacgcctcgaccgccgggtggctggtggaaccacaaagtgggcaaggctgacccgcctgtaactgtgcacgttgagcttccagcgttttgatgcgcgcttcctgctcgcaaatggttttcacatcggcaagttgctgcgtcttttctttataacgctggcgcatttcgttaagtgcggcgttacgttgcgtctgttcttgcgtgacattctggatagcgacctgtaactgcgccagacgtttttgttggggaacaatctgtccatgcagcgcgaccaggtgctgacgcagtgggcgttgctcagcatgttgcgccagggcggtagcaacttcatcggcggttaacgtcaacgtgatcgccgcaagcgcattaagtttttgctcagcatgggttaactgttgctgccattgccgcagatgctcgcgatcgctggtttgttgggagaactgcgcacgccaacccgccggttcgttgttccactgacggaagcggtcgtgttcctgtaaccaggtattcaggctttgttgctgctgctgtaattctgcactctgcttcgccgcgtggtggcgaatgctcgcgcgaagcgccattgtgctctgtaagcgagtatttacttcttcaatctgctggcgaatatgcgccagcgccgcgctgtgttctgcgatgcgttcccagtgtggacgaagatttcgtgccggttgtgccagactaagcgccgccagttgaggttgcgctttttcttcttcggctaacgcctgttgcaaggcctgctgacggcggctggcttcttgctgcaattcgtcctgacgcgttaaccagtttaggctttgttgttcttgctgctgcgcggtaattaactgtttttcttcgtcagtaagtacctgcaaactcgctgtcaggctttgcacttgttccggcgtgagcaacgtgacgccgctggcctgcgcttgcagcttctccagctctgtgcgggcgcttttgtgctgctcaaaaaccatcgcgctgatttgcccgtagatttcagtgccggttaactcctcgagcaattccgcgcgttctttgggtttggcattcaggaaggcagcaaattgcccctggctaagcagcatgctacgggtgaagcgcccgtaatccagcccggttaacgtcgctgtcagttccagcttatctttcactttgtcggcgagaattttgccgtcggcgcagcgcgccagctctacgcgtggcacctgcaaattaccgtcgggttggttacgcgcccgattctggctccagaatgcacggtacgcttcacctttcacttcaaactccacctccgccagacattcggcggtatcgcgggtcatgagatcattttggctttgactaacgttagagagacgcggagtttcgtgatacagcgccagacaaatggcgtccagcagggtggttttccccgcacctgttgggccggtaatagcaaacagcccgttgctggcgaacggctcgcgggtgaaatcaatcttccattcgccttttaaactgttcaggtttttcaggcgcaggctgagaattttcatgcttcgtgttctccggcgagggtatgcaacgtcgtggtgaaaagatgctgcagacgttgctgctggctttcatccagttcttccagtgccagacggcgattgaacacctcttcgacgctgagttcgctgagggtttcacgctgttggctggctaacacacgctcgcgctgttcacgactccgacgtaccagcaatacttcgacaggcaaactttcggttaatgcctggattttgcgctgaatatcatgcagatactcatcagtagtgatttcgatatccagccagacaggtggctcctggcttacatcgcgccactgttccagctgtgcggtaatgctcgccagatcgcctttcagcactgccatgggttgcgttaccggtacgttcaggttttccacgctctctaatttgccgttactaaatgtcaccagatggacatatttactcttaccgcattcatcaaaactcagtggaatgggggagccgcaatagcgaacatgttccatgccgccaataatctgtgcgcggtgaatatgcccgagcgcgatgtagtcggctggtggaaagttttgtgccggaaacgcgtccagcgtgccaatataaatgtcacgcacggcgtcacttttactggcccccacggtcgttaaatgtcccgtggcgatgatgggcagaggctgatcgccgcgcagtttgcaggcatcggcatagtgttgttggtaataatcggtaatcgctgccagtaaatgctgctgtttttcaataccgttaagccccgcctggctggtaataatgtcacgcggacgtaaaaacggaatggggcacagcactgcgcctggcgtcccgtcgcgacgaggcaagatttgcggcgcatgtccggcgctggcgaccacggtagtattgaggaacgccatgatatcgcggctttcattcagcgtggcgacgctgtcatggtttcctgccagtaccaccagatgacagccagtttgctgtaaattgacaacaaaacggttgtataacgtgcgggcgtaactgggcgggctgccggtatcgaaagcatcaccggcaacaataatcgcatccacctgatgggtttgtgctgtctccagcagccagtcaagaaaagcctgatgttcagcttcgcggcttttactgtagaagttctggccgagatgccagtcactggtgtgaaggatgcgcataacggttccctggcgaaaaagcatgggcgcgattatacccaaacagatgtgccatttgcttttttctgcgccacggaaatcaataacctgaagatatgtgcgacgagcttttcataaatctgtcataaatctgacgcataatgacgtcgcattaatgatcgcaacctatttattacaacagggcaaatcatggcgagacgtattctggtcgtagaagatgaagctccaattcgcgaaatggtctgcttcgtgctcgaacaaaatggctttcagccggtcgaagcggaagattatgacagtgctgtgaatcaactgaatgaaccctggccggatttaattctcctcgactggatgttacctggcggctccggtatccagttcatcaaacacctcaagcgcgagagcatgacccgggatattccagtggtgatgttgaccgccagaggggaagaagaagatcgcgtgcgcggccttgaaaccggcgcggatgactatatcaccaagccgtttagcccgaaggagctggtggcgcgaatcaaagcggtaatgcgccgtattagcccaatggcggtggaagaggtgattgagatgcagggattaagtctcgacccgacatctcaccgagtgatggcgggcgaagagccgctggagatggggccgacagaatttaaactgctgcacttttttatgacgcatcctgagcgcgtgtacagccgcgagcagctgttaaaccacgtctggggaactaacgtgtatgtggaagaccgcacggtcgatgtccacattcgtcgcctgcgtaaagcactggagcccggcgggcatgaccgcatggtgcagaccgtgcgcggtacaggatatcgttttagtacccgcttttaacgccttgctcatcggacgcagagcagggcttatgatttcttaactggagtatcttacgtgctggaacggctgagctggaaaaggctggtgctggagctgctactttgctgcctcccggctttcatcctgggtgcattttttggttacctgccctggtttttgctggcaagcgtaacaggactgcttatctggcatttctggaatttattgcgccttagttggtggctgtgggtggatcgcagtatgaccccgccaccggggcgtggtagctgggaaccgctactatacggcttacaccagatgcagctgcgaaataaaaaacgccgccgtgaactgggcaatctgattaaacgctttcgtagcggcgcggagagcctgcccgacgcggtggtgctgaccacggaagagggcggtattttctggtgtaacggtctggcgcaacaaattcttggtttgcgctggccggaagataacgggcagaacatccttaacctactgcgttacccggagtttacgcaatatctgaaaacgcgtgatttttctcgcccgctcaatctggtgctcaacaccgggcggcatctggaaattcgcgtcatgccttatacccacaaacagttgctgatggtggcgcgtgatgtcacgcaaatgcatcaactggaaggggcgcggcgtaacttttttgccaacgtgagccatgagttacgtacgccattgaccgtgttacagggttacctggagatgatgaatgagcagccgctggaaggcgcggtacgcgaaaaagcgttgcacaccatgcgcgagcagacccagcggatggaaggactggtgaagcaattgctgacgctgagcaaaatagaagccgcaccgacgcatttgctcaatgaaaaggttgatgtgccgatgatgctgcgcgttgttgagcgcgaggctcagactctgagtcagaaaaaacagacatttacctttgagatagataacggcctcaaggtgtctggcaacgaagatcagctacgcagtgcgattagcaacctggtctataacgccgtgaatcatacgccggaaggcacgcatatcaccgtacgctggcagcgagtgccgcacggtgccgaatttagcgttgaagataacggaccgggcattgcaccggagcatattccgcgcctgaccgagcgtttttatcgcgttgataaagcgcgttcccggcaaaccggcggtagcggattagggttagcgatcgtgaaacatgctgtgaatcatcacgaaagtcgcctgaatattgagagtacagtaggaaaaggaacacgtttcagttttgttatcccggaacgtttaattgccaaaaacagcgattaatccgcctttgtcatcttttattgccataagccagtcgatgctggcttattttctttgcagtcaaaatacgggcgttagattttacaacgattggtgattttttgttcgcatgattagccatgtctttttcacggaaatagtgttttatactggttggtgatttcttatcgctatatacctctggtttttagatccctccttgctttaaaacgttataagcgtttaaattgcgcttcaggtgctgtcatactgactgcattaacgcggtaaatcgaaaaactattcttcgccgcgcctggttgggagtatttcccgctaaaattgtttaaatataccgctgtatcatccccagggattggcacaaaaatttaacgttacaacaccacatccacaggcagtatgatttatgacccatcaattaagaagccgcgatatcatcgctctgggctttatgacatttgcgttgttcgtcggcgcaggtaacattattttccctccaatggtcggcttacaggcaggcgaacacgtctggactgcggcattcggcttcctcattactgccgttggcctgccggtattaacggtagtggcgctggcaaaagttggcggcggtgttgacagcctcagcacgccaatcggtaaagtcgctggcgtactgctggcaacggtttgttacctggcggtggggccgcttttcgctacgccgcgtacagctaccgtttcctttgaagtggggattgcgccgctgacgggtgattccgcgctgccgctgtttatctacagcctggtctatttcgctatcgttattctggttagcctctatccgggcaagctgctggataccgtgggcaacttccttgcgccgctgaaaattatcgcgctggtcatcctgtctgttgccgctattgtctggccggcgggttctatcagcacggcgactgaggcttatcaaaacgctgcgttttctaacggcttcgttaacggctatctgaccatggatacgctgggcgcaatggtgtttggtatcgttattgttaacgcggcgcgttctcgtggcgttaccgaagcgcgtctgctgacccgttataccgtctgggctggcctgatggcgggtgttggtctgactctgctgtacctggcgctgttccgtctggggagtgacagcgcgagcctggtcgatcagtctgcaaacggcgctgctattctgcatgcttacgttcagcacacctttggcggcggcggtagcttcctgctggcggcgttaatcttcatcgcctgcctggtaacggcagttggcctgacctgtgcttgtgcagaattctttgcccagtacgtaccgctctcttatcgtacgctggtgtttatcctcggcggcttcagcatggtggtttctaacctcggcttaagccagctgatccagatctccgtaccggtgctgaccgctatttatccgccgtgtatcgcactggttgtattaagttttacacgcagttggtggcataatagctcccgcgtgattgctccgccgatgtttatcagcctgctttttggtattctcgacgggatcaaagcatctgcattcagcgatatcttaccgtcctgggcgcagcgtttaccgctggccgaacaaggtctggcgtggttaatgccaacagtggtgatggtggttctggccattatctgggatcgcgcggcaggtcgtcaggtgacctccagcgctcactaaatcactgaacatttgttttaaccacggggctgcgatgccccgtggttttttattgtgttgatgggttaggaattgatggaaagtaagaacaagctaaagcgtgggctaagtacccgccacatacgctttatggcactgggtagtgcaattggcaccgggctgttttacggtagcgcagacgccatcaaaatggccggtccgagcgtgttgttggcctatattatcggtggtatcgcggcgtatatcattatgcgtgcgctgggggaaatgagcgtacataacccggccgccagctctttcagccgttatgcgcaggaaaacctcggcccgctggcaggttacattaccggctggacctactgctttgaaatccttattgtcgccatcgccgatgtgaccgcttttggtatctatatgggtgtctggttcccgacggtgccgcactggatttgggtactgagcgtggtgctgatcatttgcgccgtaaacctgatgagcgtgaaggtattcggtgagctggaattctggttcagcttctttaaagtcgccaccatcatcatcatgattgtcgccggtttcggcatcatcatctgggggattggcagcggcgggcaaccgaccggtattcataacctgtggagcaacggcggcttcttcagtaacggctggcttggcatggtaatgagcttgcaaatggtgatgtttgcttacggtgggatcgaaattatcgggattaccgccggtgaagcgaaagatcctgagaaaagcataccgcgtgcgattaactccgtgccgatgcgtattctggtgttctacgtcggtacgctgttcgtcattatgtctatctacccgtggaatcaggttggcactgccggtagcccgttcgtgctgacgttccagcatatgggcattacctttgccgccagcattcttaactttgttgtgctgactgctagcctgagcgcaattaacagtgatgtatttggcgtaggccgtatgctccacggtatggcagagcagggcagcgcgccgaaaattttcagcaaaacgagccgtcgcggtattccgtgggttacggtgctggtgatgactaccgcgctgctgtttgcggtgtatctgaactacatcatgccggaaaacgtcttcctggtgatcgctagcctggcaaccttcgccacggtgtgggtgtggattatgatcctgctgagccaaattgccttccgtcgccgtttgccgccagaagaagttaaggcgctgaaatttaaagtgccgggtggggtagcaacgaccatcggcgggctgattttcctgctctttattatcgggttgattggttatcacccggatacgcgtatcagcctgtatgtcggtttcgcgtggattgttgtgctgttgattggctggatgtttaaacgccgccacgatcgtcagctggctgaaaaccagtaatccttgcgttctgtaagccggttcaggaggaaatcctgatccggctattccgaaagttatccgcccccgtcctcctcccccaaatatccttcagatgatgagtgatcctgcattaggctatggcaaggtgatcagattttcatcacaggggaattatgatgttaaatgcatggcacctgccggtgcccccatttgttaaacaaagcaaagatcaactgctcattacactgtggctgacgggcgaagacccaccgcagcgcattatgctgcgtacagaacacgataacgaagaaatgagtgtaccgatgcataagcagcgcagtcagccgcagcctggcgtcaccgcatggcgtgcggcgattgatctctccagcggacaaccccggcggcgttacagtttcaaactgctgtggcacgatcgccagcgttggtttacaccgcagggcttcagccgaatgccgccggcacgactggagcagtttgccgtcgatgtaccggatatcggcccacaatgggctgcggatcagattttttatcagatcttccctgatcgttttgcgcgtagtcttcctcgtgaagctgaacaggatcatgtctattaccatcatgcagccggacaagagatcatcttgcgtgactgggatgaaccggtcacggcgcaggcgggcggaagtacgttctatggcggcgatctggacgggataagcgaaaaactgccgtatctgaaaaagcttggcgtgacagcgctgtatctcaatccggtgtttaaagctcccagcgtacataaatacgataccgaggattatcgccatgtcgatccgcagtttggcggtgatggggcgttgctgcgtttgcgacacaatacgcagcagctgggaatgcggctggtgctggacggcgtgtttaaccacagtggcgattcccatgcctggtttgacaggcataatcgtggcacgggtggtgcttgtcacaaccccgaaagcccctggcgcgactggtacagctttagtgatgatggcacggcgctcgactggcttggctatgccagcttgccgaagctggattatcagagcgaaagtctggtgaatgaaatttatcgcggggaagacagtattgtccgccactggctgaaagcgccgtggaatatggacggctggcggctggatgtggtgcatatgctgggggaggcgggtggggcgcgcaataatatgcagcacgttgccgggatcaccgaagcggcgaaagaaacccagccggaagcgtatattgtcggcgaacattttggcgatgcacggcaatggttacaggccgatgtggaagatgccgccatgaactatcgtggcttcacattcccgttgtggggatttcttgccaataccgatatctcttacgatccgcagcaaattgatgcccaaacctgtatggcctggatggataattaccgcgcagggctttctcatcaacaacaattacgtatgtttaatcagctcgacagccacgatactgcgcgatttaaaacgctgctcggtcgggatattgcgcgcctgccgctggcggtggtctggctgttcacctggcctggtgtaccgtgcatttattacggtgatgaagtaggactggatggcaaaaacgatccgttttgccgtaaaccgttcccctggcaggtggaaaagcaggatacggcgttattcgcgctgtaccagcgaatgattgcgctgcgtaagaaaagtcaggcgctacgtcatggcggctgtcaggtgctgtatgcggaagataacgtggtggtatttgtccgcgtgctgaatcagcaacgtgtactggtggcaatcaaccgtggcgaggcctgtgaagtggtgctacccgcgagtccgtttctcaatgccgtgcaatggcaatgcaaagaagggcatgggcaactgactgacgggattctggctttgcctgccattagcgctacggtatggatgaactaacgttttataacgccttgcgactcgcctgcgccatcatccgcggataaaactgccagaagcgggtttcgagggcgtcataatgagcgtctaaatcgtaccaggagtcacgcagggcatccagacgtgggcggcggcttgccatgccgtttaacacgttctggatgaaatccatatcgcgatagcgcaccagccactgctcactccacaagtaattgttcagattgataaaacgtggcggactgtccggcaaaatcgtcatcacttgctcgcgggcataacagacaaattcctgtagcggaaagtccgggctcagctggctccagtggcgggaaagaaagtgatcccacatgacatccagcgtaataggcgcaacgcggcgcgtttcactacgaaaccactcccgtgcttcgcggacttccggcagattgtcagtcaatacgtcgatacgtcgatgcatatgaatgccagccacgacgtcgggcggaaaactttcttcaggatttccgcgtacgaaatcagccagtaaattgccggaaaggctgctttccgcgagatgggctaaatgcaggtgagctaaaaaattcatcgattatattctatccaaaagggggtaaaggttgcagggagagcgccccggcactagactacccgcctcttattttagtctgagtcagtgtcatgcgcgttaccgatttctcctttgaattgcccgaatccctgattgcccactatcccatgcctgaacgcagtagctgtcgtttactgagcctggacgggccgacgggcgcgctgacgcacggtactttcaccgatttacttgataagctcaaccccggcgatcttctggtttttaataatacccgcgtgatcccggcgcgcctgtttgggcgtaaagccagcggcggcaagattgaagtgctggttgaacggatgctcgacgacaaacgcattcttgcgcatattcgcgccagcaaagcgccaaaacctggcgcagaactgctgctgggcgatgacgaaagtattaacgcaacaatgaccgcgcgccacggcgcactgtttgaagtcgaatttaatgatgaacgcagcgtgctggatattctcaacagcatcggccatatgccgctgccgccgtatatcgaccgtccggacgaagacgctgaccgcgaactttatcaaaccgtttatagcgaaaaaccgggcgcggttgcagccccgaccgcaggtctgcattttgacgagcctttgctggaaaaattgcgcgccaaaggcgtggagatggcgtttgtgacgttgcacgttggtgcgggcaccttccagccggtgcgcgtcgacaccattgaagatcacatcatgcacagcgaatacgctgaagtaccgcaggatgtggtagacgcggtactggcggcgaaagcgcgcggtaaccgggtgattgcggttggcaccactagtgtacgtagcctggaaagcgcggctcaggcagcgaaaaacgatctcattgaaccgttcttcgacgatacccaaatctttatctatccgggcttccagtacaaagtggtcgatgcgctggtgacgaacttccacttgccagagagcacgctgattatgctggttagcgcctttgccggttatcaacacaccatgaacgcctataaagcagcggtagaagagaaatatcgcttttttagttacggtgatgcgatgtttatcacgtacaatccgcaggcaattaatgagcgcgtcggggagtaattccgcggcgctggtttaaaacgttggactgtttttctgacgtagtggagaaaaaatgaaatttgaactggacaccaccgacggtcgcgcacgccgtggccgcctggtctttgatcgtggcgtagtggaaacgccttgttttatgcctgttggcacctacggcaccgtaaaagggatgacgccggaagaagttgaagccactggcgcgcaaattatcctcggcaacaccttccacctgtggctgcgcccgggccaggaaatcatgaaactgcacggcgatctgcacgattttatgcagtggaaggggccgatcctcaccgactccggcggcttccaggtcttcagccttggcgatattcgtaaaatcaccgaacagggcgtgcacttccgtaacccgatcaacggcgatccgattttcctcgatcctgaaaaaagtatggagattcagtacgatcttggtagcgatatcgtcatgatctttgatgagtgtacgccgtatcctgctgactgggattacgcaaaacgctccatggagatgtctctgcgttgggcgaagcgtagccgtgagcgttttgacagtctcggaaacaaaaatgcgctgtttggtatcatccagggcagcgtttacgaagatttacgtgatatttctgttaaaggtctggtagatatcggttttgatggctacgctgtcggcggtctggctgtgggtgagccgaaagcagatatgcaccgcattctggagcatgtatgcccgcaaattccggcagacaaaccgcgttacctgatgggcgttggtaaaccagaagacctggttgaaggcgtacgtcgtggtatcgatatgtttgactgcgtaatgccaacccgcaacgcccgaaatggtcatttgttcgtgaccgatggcgtggtgaaaatccgcaatgcgaagtataagagcgatactggcccactcgatcctgagtgtgattgctacacctgtcgcaattatagtcgcgcttacttgcatcatcttgaccgttgcaacgaaatattaggcgcgcgactcaacaccattcataaccttcgttactaccagcgtttgatggcgggtttacgcaaggctattgaagagggtaaattagagagcttcgtaactgatttttaccagcgtcaggggcgagaagtaccacctttgaacgttgattaatattaataatgagggaaatttaatgagcttttttatttctgatgcggtagcggcaacgggtgcaccggcgcaaggtagcccgatgtctttgattttgatgctggtggtattcggtctgattttctatttcatgatcctgcgtccacagcagaagcgcaccaaagaacacaaaaagctgatggactccattgccaaaggtgatgaagttctgacgaacggtggcctggttggtcgcgtaaccaaagtagcggaaaacggctacattgctatcgcgctgaatgacaccactgaagtagttattaaacgtgacttcgtagctgccgtcctgccgaaaggcaccatgaaggcgctgtaattaaaatttttccctaagggaattgccgtgttaaaccgttatcctttgtggaagtacgtcatgctgatcgtggtgattgtcatcggtctgctgtatgcgcttcccaacctgtttggtgaggatccggctgttcagatcactggtgcgcgcggagtcgccgccagtgagcaaacgctgatccaggtccagaaaacgttacaagaagaaaaaataactgctaagtctgtggcactggaagagggcgctattcttgcgcgcttcgactccactgacacccagttgcgcgctcgtgaagcattaatgggcgttatgggtgacaaatacgtcgtggcgcttaaccttgccccggcaacgccgcgctggctggcagctattcacgctgagccgatgaagctcggccttgacctgcgtggcggcgttcacttcctgatggaagtggatatggacaccgcgcttggcaaactccaggaacaaaatatcgatagcctacgcagtgacctgcgcgaaaagggcatcccgtataccactgttcgtaaagaaaacaactacggcctgagcatcactttccgcgatgctaaagctcgtgatgaagccattgcgtatctgagcaagcgccatccggacctggtgattagcagccagggcagcaaccagctgcgtgcggtaatgagcgatgctcgtctgagtgaagcgcgtgaatatgcggtgcagcagaacattaatatcctgcgtaaccgtgtaaaccaacttggcgtggcggagccggtggttcagcgtcagggtgctgaccgtatcgttgttgaactgccaggtattcaggacactgcgcgtgcgaaagagattctgggtgcgacggcaacgctggaattccgtctggtaaacaccaacgttgaccaggccgctgcggcatccggtcgcgtaccgggcgactctgaagtgaaacagacccgcgaaggtcagccagttgtgctgtacaaacgcgtaattctgaccggtgaccatatcaccgactccacttccagccaggacgaatacaaccaaccgcaggttaacatcagcctcgatagcgctggtggtaacatcatgtctaacttcactaaggacaacatcggcaaaccgatggcaaccctgtttgtggagtacaaagacagcggtaagaaagatgcaaatggtcgtgcggttctggtgaaacaggaagaggtgattaacatcgccaacatccagtctcgtctgggtaacagcttccgtatcaccggcatcaacaacccgaacgaagcccgtcagctgagtctgctgctgcgtgccggtgcgttgatcgcgccgattcagattgttgaagaacgtaccattggcccaaccctgggtatgcagaacattgaacaggggctggaggcttgccttgccggtctgctggtttctattctgttcatgatcatcttctataagaagtttggtctgattgcgaccagtgctctgattgccaacttgatcttaatcgtcggcattatgagcctgttgccaggcgcaacgctgagtatgccaggtatcgcgggtatcgtcttaacccttgcggtggcggtcgatgcgaacgtactgatcaacgaacgtattaaagaagagttgagcaacggacgtactgttcaacaggcaattgatgaaggttatcgtggcgcattcagttctatcttcgatgcgaacatcaccacgctgattaaagtcatcatcctgtacgcagtgggtaccggggcaattaaagggttcgcgattactaccggtatcggtgtggcgacgagcatgtttaccgcgattgtcggtacgcgtgccatcgtaaacctgctatatggcggcaagcgcgtcaagaagctgagtatctgaggagtgcgatgtggcacaggaatatactgttgaacaactaaaccacggccgtaaagtctatgactttatgcgctgggactactgggctttcggcatctctggtctgctgttaatcgctgctatcgttattatgggcgtgcgcggctttaactgggggctggatttcaccggtggtacggttattgaaattacgctcgaaaaaccggctgaaattgacgtaatgcgtgatgcattgcaaaaagccggttttgaagagccgatgctgcaaaactttggtagcagccatgacatcatggtccgtatgccgcctgctgaaggcgaaaccggcggtcaggtgttgggcagccaggttctgaaggtgattaacgaatccaccaatcagaatgcagcagtgaagcgtattgagttcgtcggtccgagcgtgggggcagaccttgcgcaaaccggtgcgatggcgttgatggcagcgctgctgtctatcctcgtgtacgtaggtttccgctttgagtggcgactggcggcaggggtggttattgcgctggcgcacgacgttatcattacgctgggtattttgagcttattccatatcgagattgacctgaccattgtggcaagcttgatgagcgttatcggttacagccttaacgacagtatcgtggtaagcgaccgtattcgtgaaaacttccgcaagatccgtcgcggtacgccttacgaaatctttaacgtgtccttgacccagacgctgcaccgtaccttgatcacatccggtactaccttgatggttatcctgatgctgtacctcttcggtggtccggtactggaaggcttcagcctgaccatgcttatcggtgtttccatcggtactgcatcttccatctatgtggcatctgcgttggctctgaaactgggtatgaagcgcgaacacatgttgcagcagaaagtggaaaaagaaggggcggatcagccgagtattctgccgtaatcaagttcccgttgatgttgaaaatcccggtcagaagatcgggattttttttgatgtatggagattgcgaaaatccccgcatcttgggaaactgcgcgtaaccctacatttcatccaggtaacttttcatggctatcatcccaaaaaactatgcgcggttagaaagcggctatcgcgaaaaagcattaaaaatctatccgtgggtctgcggtcgctgttcccgcgagtttgtttattccaacctgcgtgaacttaccgttcaccacattgatcacgaccataccaataacccggaagatggcagtaactgggaattgttgtgtctctattgccacgatcatgagcatagcaaatataccgaagcggatcagtatggtacgaccgttatcgcaggggaagatgcgcagaaagatgtcggtgaagcgaagtacaacccattcgctgacctgaaagcgatgatgaacaagaagaagtgattaaaacgtaaaattgcctgatgcgctacgcttatcaggcctacgttatttcagcaatatattgaatttacgtgcttttgttggccggacaaagcgtttacgccgcatccggcatgaacaaagcacacgttgttaacaatcagaaatgccgggaataaatcccggcattttcataatcagaagttgtaacctactaccaggtaaccaccccagccggtagagcgaacgttgaagttgccgttgccgaagttcagttctgcatcgtcgttccactgaccaccgtcgtgccagtaacgagctacgacagagtagtgccagtgatcgtagttcagagccagaatatggctggaagcgatagagttattagtacgggtcttaataccgttgattgcgttaccgctgtcatcccctaaatcggaaccccagtcgaagttggtgaagccgatgtagctcagctgaccgccccacagatcggtaatcggcacaaagtatttaattttgaaacggtaaccgtcccactcgttttcgttcgctgcgccatagttctgccactggtatttcgcatagacgttcatggacaggctcatcggcaggccagtgtcgatatcggtacccagacccatgtaccaggtgctctggcgaccatctttattacgacccatgtcgtaaatgtagttgttcgcgaagtaccactctttgaacggaccgaagctaaggtcagtattggtcagcttgtcgatggagaaacgtggttcgatttccataaacagcggagaaccgtggttccagatacctttagcatcggagttaccgccgaagaataccggcgcatccgcataaccatagaagtcgaaccagtcttttttagcgaatgcttcgtactcaaggtaggtatcgttgcggatctgcggtccgaaacgggtgtgatagcttccgacaacgttaacgctctggtgccaccagtcggaaagatactgcggtttgtcgttttcagctgcgttgacagtaaaagagctagagagcgccagtaccgcaccggctgccagtaatgtttttttcatatgtatgccactgtttgaaaatcccttgcgggagtgaaaaaggcgcaaattgcgtttctaaatatttcgtatacagaggagcctattataaaaatcattgctcacaaaaatatgtttcgtttcacagttctatcatttacgtaatcgattgcgttcacgtttacacacattcgggcggggattgtactgactttcgcccttgttgcaaacttttactatcaatccaggtgatgtaagcagagtaacaaaatgacggggaaagatgttgcgggacgcacaaaatcgtcccgaaatacgtttactgcataacaggttgaatgtcgtggatacgtacaaagcctaactgatccacagaaatcccctttaactgtaacggaatatcaacatcgctgggggcgaggacgctggcaggggcattaatcaattgattctgcacattgatttcctgaaagttgtctattgttccctgaatttgcccatattcaacagttccgctgaatgcgggcaagggatcattgctctcaccctgaatacgtagtgtaagggtggtgccatctgcatcaggcgtaatattcaccaggctcatacgtaaagtaccgatctggctttccagtcttgccggtgttttcgctccaggcagaaggtaaaccccactgctggattttgcattcagcctgttttgctgagtgattttgactgtttcttgattgagttgcgtcatctcctggttcagcgtgctgacgctgtgtttcatctgtcgcacttcactttgctgcacacaggcgctaaggctgaacaggcttcccagcaggagcagtcgaaaaacgttagtattcataggtcgtccctttctcgtcgcaattagcctaatggtagagggtaaaagcagcgaaagcatcgatcctttatctcaaaagcgttgcgcctttgttgtatcgtcagttcagggtaaaatagatttccgttaaccacctggtcaggacgccgtatgcattgcccattctgtttcgccgtggacactaaggtaattgactctcgtctcgtgggcgagggtagttccgtacgccgccgtcggcagtgtctggtgtgtaatgaacgtttcaccacctttgaagtggcggagctggttatgccgcgtgttgtaaaaagcaacgacgtgcgtgaaccgtttaatgaagagaaattgcgtagcggaatgctgcgggcgctggaaaaacgtccggtgagttccgatgacgtcgaaatggcaatcaatcatattaaaagccagctgcgcgccaccggtgagcgcgaagtgccgagcaagatgattggcaatctggtgatggagcaattgaaaaagctcgataaagtcgcctatatccgttttgcctctgtctaccgcagtttcgaagatatcaaagaatttggcgaagagatcgcgcgcctggaggactaagccgtgcaggacgagtattacatggcgcgggcgctaaagctggcgcaacgaggacgttttaccacgcatcccaacccgaatgtcgggtgcgtcattgtcaaagatggcgaaattgtcggtgaaggttaccaccaacgtgcgggtgaaccacatgccgaagtacacgcgttgcgtatggcgggtgaaaaagccaaaggtgcgaccgcctatgtcacactcgaaccctgtagccatcatggtcgtacgccaccgtgctgtgacgcactcatcgccgctggcgtagcgcgcgtggttgccagcatgcaagatcctaacccgcaggtcgctgggcgtggactttaccgtctgcaacaggctggcattgacgtcagccacggcctgatgatgagtgaagccgagcaattgaataaaggctttctcaagcggatgcgcaccggctttccttatattcagttaaaacttggcgcaagccttgatggtcgcacggcgatggcgagcggcgaaagccagtggatcactagcccccaggcgcggcgtgatgtacaactactgcgcgcgcaaagtcatgccattttaaccagcagcgccacggtgctggcggatgatcctgccttaacggtgcgttggtctgaactggatgaacaaactcaggcgctctatccgcaacaaaatctccgtcagccgatacgtattgtgattgatagccaaaatcgcgtgacgccggtacatcgcattgtgcagcagcccggcgaaacctggttcgcgcgtacgcaggaagattctcgtgagtggccggaaacggtgcgtaccttgctgattccagagcataaaggtcatctggatctggttgtactgatgatgcaactgggtaaacagcaaattaacagcatctgggtggaagcggggccaacgctcgctggcgcattgctgcaggcgggtttagtcgatgagctgattgtctatatcgcacctaaactattaggcagcgacgcccgcggattatgcacgctgccagggcttgagaaattagccgacgccccccaatttaaattcaaagagatacgtcatgtaggcccggatgtttgcctgcatttagtgggtgcatgatctcccggctcgaaagggaagcagcgcacgaaatattatgctaaaatccgcccccctgcggggccatactcgaacccgaaggaagaaaatgaacattattgaagctaacgttgctaccccggacgctcgcgtcgccatcaccatcgcgcgtttcaacaactttatcaatgacagcctgctggaaggtgcaattgacgcactgaaacgtatcggtcaggtaaaagatgaaaacattaccgttgtttgggtgcctggtgcctatgagctgccgctggcggcgggtgcactggctaaaaccggtaaatacgacgcggtgattgcgctgggtacggttattcgtggtggcactgcccactttgaatatgtcgctggtggtgcaagcaacggcctggcgcatgttgcccaggacagcgaaattccggttgcttttggggttctgaccactgaaagcattgaacaagcgatcgaacgtgctggcaccaaagctggcaacaaaggtgcagaagctgcactgaccgcgcttgaaatgattaatgtattgaaagccatcaaggcctgaaattagtaaggggaaatccgtgaaacctgctgctcgtcgccgcgctcgtgagtgtgccgtccaggcgctctactcctggcagttgtcccagaacgacatcgctgatgttgaataccagttcctggctgaacaggatgtaaaagacgttgacgtcctgtacttccgtgagctgctggccggggtggcgactaataccgcatacctcgacggactgatgaagccatacctgtcccgcctgctggaagaactgggacaggtagaaaaagcagtactgcgcattgcgctgtacgaactgtctaaacgtagcgatgtgccatacaaagtggccattaacgaagcgatcgaactggcgaaaagcttcggcgcagaagacagccataagttcgtcaacggcgtactcgataaagcagcacctgtgattcgccctaacaaaaagtgatatccaggccggtagattcacggaagaccgttccatgatcgccggccttttcttttttacctgctgaggcataacgtatggcatgtggcgagttctccctgattgcccgttattttgaccgtgtaagaagttctcgtcttgatgtcgaactgggcatcggcgacgattgcgcacttctcaatatccccgagaaacagaccctggcgatcagcactgatacgctggtggcgggtaaccatttcctccctgatatcgatcctgctgatctggcttataaagcactggcggtgaacctaagcgatctggcagcgatgggggccgatccggcctggctgacgctggcattaaccttaccggacgtagacgaagcgtggcttgagtccttcagcgacagtttgtttgatcttctcaattattacgatatgcaactcattggcggcgataccacgcgtgggccattaagtatgacgttgggtatccacggctttgttccgatgggacgagccttaacgcgctctggggcgaaaccgggtgactggatctatgtgaccggtacaccgggcgatagcgccgccgggctggcgattttgcaaaaccgtttgcaggttgccgatgctaaagatgcggactacttgatcaaacgtcatctccgtccaagcccgcgtattttacaggggcaggcactgcgcgatctggcaaatagtgccatcgatctctctgacggtttgatttccgatctcgggcatatcgtgaaagccagcgactgcggcgcacgtattgacctggcattgctgccgttttctgatgcgctttctcgccatgttgaaccggaacaggcgctgcgctgggcgctctctggcggtgaagattacgagttgtgtttcactgtgccggaactgaaccgtggcgcgctggatgtggctctcggacacctgggcgtaccgtttacctgtatcgggcaaatgaccgccgatatcgaagggctttgttttattcgtgacggcgaacctgttacattagactggaaaggatatgaccattttgccacgccataaagatgtcgcgaaaagtcgcctgaagatgagtaatccgtggcatctacttgctgtcggattcggaagtggattaagcccgatcgttcctgggacgatgggcagcctggcagcgattccgttctggtatctgatgacctttttgccctggcagctctacagcctggtggtgatgctggggatctgtatcggcgtctatctttgtcatcaaacggcgaaagacatgggtgtgcacgatcatggcagcattgtctgggacgaatttattggtatgtggatcacgctcatggcgctgccgaccaatgactggcagtgggttgccgccgggtttgtgattttccgtattctggatatgtggaagccgtggccgatccgctggtttgatcgcaatgtgcatggcggcatggggatcatgatcgacgatattgtcgccggggtgatttccgcaggcatcctgtattttatcggtcatcactggccgctgggtattctgagctaattgtgcaccgatgcctgatgtgacgcttgtcacgtctcatcaggcctggactcttatttaaatcctacgacaggatgcggtttatacggcgtttccagttcggcaatctgttccggcttcaaagtgatatccaccgcgttcaatagctcatcaagctgttcttcgcggctagttccgataatcggtgcggcaatgcccggtttactcaacaaccaggccagcgcaacttgtgctcgtgtcgcccccagttcttcactgacgcctgttaaccgctctgcgatctgcgcgtcattttcatcgctttctttatagagatttttccccacctcatcagacaccagtcgtgcggtagtttctccccacggacgcgtcagacggccccttgccagcgggctccatggaattaccgccacgccctcctgataacacagtggtagcatctcgcgctcttcttcacgataaatcagattgtagtgatcctgcatactgacaaactgcgcccagccgtgctgtttttggagttccagtgcctgagcaaactggctagcgtgcatactactcgcgccgatataacgcgctttcccggcttttaccacgtcgttgagggcttccagcgtctcttcgatcggcgtgttgtaatcccagcgatgaatttgcaggatatcgacataatccatgccgagacgtcgcaggctgtcgtcgatagagcgcaaaatttgcgcacgggataatccttccggtaaatcaccaacgcgatggaacactttggtcgcaacgaccacgtcttcacgacgggcgaaatcccgcagtgcgcgaccgacgatctcttcgctgctgccgtcagaataactgttggcggtatcaaagaaatttatgccgccttccagtgcacgtttaattatgggacggctgctttcttccggcagtgtccatgcgtgattaccgcgatctggctcgccaaaggtcatacagccgaggcaaagtcgggaaacgcgaaggtcggtttttcctaaggggttgtattgcatgctgccactcctgctatactcgtcatacttcaagttgcatgtgctgcggctgcattcgttcaccccagtcacttacttatgtaagctcctggggcttcactcgtttgccgccttcctgcaactcgaattatttagagtctatgaataatttcttaagcatagcaggagtggagtagggattatgccagccaggccttgattttggcttccataccagcggcatcgaggccgagttcggcgcgcatttcttcctgagttccttgcggaataaagaagtccggcaggccaatgttcagcacgggtactggtttacgatgggccatcagcacttcgttcacgccgctgcctgcgccgcccataatggcgttttcttctacggtgaccagcgcttcatggctggcggccatttccagaattaacgcttcatcaagcggtttcacaaaacgcatatcgaccagcgtggcgttcaggctttcggcgactttcgccgcttctggcatcagcgtaccaaagttaaggatcgccagtttctcgccacgacgcttcacaatgcctttgccaattggtagtttttccagcggcgtcagttccacgccgaccgcgttgccacgcgggtagcgcaccgcactcgggccatcgttatagtgatagccggtatagagcatctggcgacattcgttttcatcgctcggggtcataatgaccatttccggtatgcagcgcaggtaagagagatcaaaagcaccctgatgggtttgaccgtcagcaccaacaatgcccgcgcggtcgatggcgaacaggaccggaagcttttgaatcgccacgtcatgcagcacctgatcataggcgcgttgcaggaaagtggagtaaatcgcgacaatgggtttgtacccaccaatcgccagacccgcagcaaaggtcaccgcgtgttgctcggcaattgccacgtcgaagtagcgatccgggaatttacgactaaactcgaccatgccggaaccttcacgcatcgccggagtaatcgccatcagcttgttgtctttcgctgccgtttcgcacaaccagtcgccaaagattttactatagctcggcaaaccgccgctacttttcggcaaacaaccgctggagggatcaaatttaggcacggcgtggaaagtgatcgggtctttttctgccggttcataaccacgaccttttttggtcatgatatgcaggaactgcgggcctttcaggtcgcgcatgttctttagcgtggtgataagccccagcacatcgtgaccgtccaccgggccgatgtagttaaagcccagctcttcaaacaacgtgccaggcactaccatgcctttaatatgttcttcggtgcgtttgagcagctctttaattggcggcacgccagagaaaacttttttcccgccttcgcgcagactagagtaaagcttaccggaaagcagctgtgccagatggttgttgagcgcgccgacattttcggaaatgctcatttcattgtcgttgagaatcaccagcatatcaggacggatatcgcccgcgtgattcatcgcttcaaacgccatgcctgcggtaatcgcgccatcgccaatgacacagacggtgcggcgatttttgccttctttttcggcagcaaccgcaataccaattccggcactgatggaggtactactatgcccgacgcttaatacgtcatattcgctttcgccgcgccacgggaacgggtgcagaccgcctttctgacggatggtgccgattttgtcgcggcgtccggtcaaaattttatgcggataagcctgatgccccacatcccaaatcaattggtcaaacggggtgttgtagacatagtgcagcgccacggtcagttcgaccgtgcccagcccggaggcgaagtgcccgctggaacggctcacgctgtcgagtaaatagcggcgcagttcgtcgcagagtttcggtaaactctctttcggcaacagtcgtaactcctgggtggagtcgaccagtgccagggtcgggtatttggcaatatcaaaactcatcaggggcctattaatacttattgtttatttattacgctggatgatgtagtccgctagcgcttccagtgcgctggtatcgagactctgttcagccagttgtttcaggctctgacgggcatcgtcgatcagatcccgggctttcttccgggcttgctcaagacccagaagtgcagggtaggtacttttaccaagttgctggtcggcaccctggcgttttcccaacgttgcagtatctcccaccacatccaggatgtcatcctgaacctggaaggcaaggccgatgctctctgcatacttgtcgagtaccggcagagcacgacgtcctttatctccggcgcttaatgcaccaaggcgaacggcggcgcgaatcaatgcgccggttttatgacgatgaatacgctcaagcgcgtccagaggtacgtgtttgccttccgcgtctaaatctaatgcctgaccaccgcacattccggcaataccactggcgctcgccagttcagaaatcatgctaattctgtcgcggtcgctcacttccggcatatcggcatcgcttaaaatgctgaacgccagcgtttgtaaagcgtcgccagcgagaatcgcgtttgcttcgccaaacttcacatggcaggttggcaaaccgcgacgcagatcgtcatcatccattgccggtaaatcatcatgaattaaactgtaagcgtggatacactcaacggcggcagcgggtgcgtccagcgtgtttgtgctaacgccgaacatatgaccggcggcataaaccaggaaaggtcgcaggcgcttaccacctaataatgcgccatactgcatggtttcgaccacgggagtgttctgaaagggcagtggggcgataaaacggctcagcgcctggttggcctgcttaacgcaggcttcgagttgctgcggaaagtccattactcattgtccggtgtaaaaggggttagagaggcgtcttcattgtcagacagcagaatttgtacgcgctgttcggcttgttgtaatttggcctgcccctgacgtgccagctgcacgccgcgttcgaactcgttcagcgcctcttccagcggcaggtcgccactttccagacgggttacaatctgttccagctcgctcagcgccttttcaaagctggcgggcgcctcatttttcttcggcataatgaatgtctgactctcaatatttttcgccccgtcatggtaacggactcagggcaaatagcaaataacgcgcaatggtaaggtgatgtgcacagcaaagcgatgttagtggtatacttccgcgcctggatgcagccgcaggtgtgggctgctgtatttttccctatacaagtcgcttaaggcttgccaacgaaccattgccgccatgaagtttatcattaaattgttcccggaaatcaccatcaaaagccaatctgtgcgcttgcgctttataaaaatccttaccgggaacattcgtaacgttttaaagcactatgatgagacgctcgctgtcgtccgccactgggataacatcgaagttcgcgcaaaagatgaaaaccagcgtctggctattcgcgacgctctgacccgtattccgggtatccaccatattctcgaagtcgaagacgtgccgtttaccgacatgcacgatattttcgagaaagcgttggttcagtatcgcgatcagctggaaggcaaaaccttctgcgtacgcgtgaagcgccgtggcaaacatgattttagcagcattgatgtggaacgttacgtcggcggcggtttaaatcagcatattgaatccgcgcgcgtgaagctgaccaatccggatgtgactgtccatctggaagtggaagacgatcgtctcctgctgattaaaggccgctacgaaggtattggcggtttcccgatcggcacccaggaagatgtgctgagcctcatttccggtggtttcgactccggtgtttccagttatatgttgatgcgtcgcggctgccgcgtgcattactgcttctttaacctcggcggcgcggcgcatgaaattggcgtgcgtcaggtggcgcattatctgtggaaccgctttggcagctcccaccgcgtgcgttttgtcgctattaatttcgaaccggtcgtcggggaaattctcgagaaaatcgacgacggtcagatgggcgttatcctcaaacgtatgatggtgcgtgccgcatctaaagtggctgaacgttacggcgtacaggcgctggtcaccggcgaagcgctcggccaggtgtccagccagacgctgaccaacctgcgcctgattgataacgtctccgacacgctgatcctgcgtccgctgatctcttacgacaaagagcacatcatcaacctggcccgccagattggcaccgaagactttgctcgcacgatgccggaatattgtggtgtgatctccaaaagcccgacggtgaaagcagttaaaagcaagattgaagcggaagaagagaagttcgacttcagcattctcgataaagtggttgaggaagcgaataacgttgatatccgcgaaatcgcccagcagaccgagcaggaagtggtggaagtggaaaccgtcaatggcttcggcccgaacgacgtgatcctcgatatccgttctatcgatgaacaggaagataagccactgaaagtcgaagggattgatgtggtttctctgccgttctataaactgagcaccaaatttggcgatctcgaccagaacaaaacctggctgctgtggtgtgagcgcggggtgatgagccgtctgcaggcgctctatctgcgcgagcagggctttaacaatgtgaaggtatatcgcccgtaatttgtggtttttacgtcgcatctggtcagatgcgacgtttgccgcatccgacattactcgtaataattataaatccctgccgccatcaccagttgacttgccacttcatgggctttttcacgcccaaccaacaggtcgataattttcagaccaaagtcgatagctgtacccggcccctggctggtcagcaattttacccgtgcatcccagacgacgcgcttgtccagccattgttcggcgggaattttgtctttcagcgtcgggaagccggtcatattaccaatcgggaagatatcgtgcggcaccagcacggtggctggcgcggcgcaaatagccgcgacgatacgcccggaacggtggaactgtttaacggtttcaaccagcagagtgctatcgcgaaaacactccgcgcctttaatgccaccaggcagcacgatcacgtcatattcgccatcagccacttcgaccagcggcgcatccgccagcagcttcacgccgcggctgcaggtaatcgccaggttaccatcgctggcgacgctggcagtggtgactttgataccgccgcgaaccagcagatcgatagtggtgacggcttcagtctcttcactaccaggggcgaggcaaaccagtgcgcttgcgctcatattcactctcctttctttttttaattaccaggggcgaggcaaaccagtgccgatgcgctcatattcactctcctttctttttaccatttcaaacaggcgggtgttttccggtacggcaatcccatgcgcgcgggcgcggcgtaagagaaaaccattgatatagtcgatttcagtgtggcgcagcgcgcggatatcctgcaacatgctgctgatattttccgctgtggcatcaatcacctgcatcacgtaatcacgcaaatcttctgcactagtatgatgcccttcgcgttcgatcaccgccgcgacttcttcgcatatctgcataatttcttgcggatgatgacgtaattcaccgttcgggcaattccagatggcagtcagtggattaatcacgcagttgactgccagcttgcgccacagctcggcgcgaatattgttatgccaggcaacgtcaggcaacacggtttgcaaaatatccgccagataactgtaatccccgtcctgttgccgtgccgggccaatatgcgtgataccgtttgccacatgaataatgacattgccgtcgcggcgggctgcatgggtggtggtgcccatcagtaatggctgctgaatgttttgcaactcttcgatggtgcccatgccgttgtgaattaacagtattggcgtagttacaggcagtgtggacgcgaggcttttgacggcatcggaaacctgccatgctttcagcgtcaccaggagcagatcgctggtggcgagaaaatcgggatcgttggcggtcaggctttcgttaaatatgctaccatctgtctcaaccagattcacgctacaataaggttgcggtacgcgcagccagccctgaacttcatgaccctgtttgcaaagtgctgtaagccataattgccctaaggcaccgcatcccaatacggtaattttcattgttcctcctcacccgcaaccactccgggtgttcaataaggctatcccttaattgtgcatgctgttgcgactatgcacaattaagggatacgtcctggtgcaggactgtcggttatttaactttgcgggtattatgcttcgcatcaaaaatgaagggagaggaaaagatgccatctttcgatattgtctctgaagttgatcttcaggaagcacgtaacgcggtcgataacgcgagccgcgaagtggagtcccgttttgacttccgtaacgttgaagccagttttgagctgaacgacgccagcaaaaccatcaaagtgttgagcgagtccgatttccaggtcaatcagttgctggatattctgcgtgccaagctgctgaagcgcggcattgaaggcagtagcctggatgtaccggagaatatcgttcatagcggtaaaacctggtttgtggaagcgaaactgaaacagggcattgagagcgcgacccagaagaaaatcgtcaagatgatcaaagacagcaaactgaaagtgcaggcgcaaattcagggcgatgaaatccgcgtaacgggcaaatctcgtgatgatttgcaggctgtcatggcgatggtacgtggtggcgatctcggtcagccgttccagttcaaaaacttccgcgattaatcgcgactatgtgcgttttgttcatgtcagatgcggcatgaacgcctgattcggcctacaaaggtttgtaattcagaaactttgtaggcctgataagcgtagcgcagcaggcaattcgccgcgttttttatgcctgacgaattgcctgttctatctcaaagcgattcgtcactttgctgtcgattttcacataagcactatgttcttcttctgcaatcaacacttctttgatgccttcagtttctagcaaacgcacttttaacgcctcgtttgcggcaatgttcgccgggatttcaatgcgcaaactgctgacatacggcggttctttcatggtactggcgactgtcagccacactgcggccagcattgcgccagcgagaaataccccctgaccgtcaaacatgccgttaatccagccgcccaggctaccgccaatcgccacgccaagaaactggctggtggagtaaacacccatcgccgtacctttgtaacctgctgggctctctttactgataagactgggcaggagggcttccatcaaattaaacgccacaaagaaaagctgcacgccgaccaccagttgccagaactgcgtttgcgcgttccacaacacaatttccgcaaccacgatcaacccgacgcagaagacaaagacttgcttcattttgcgcttaacttcagcgtagataatgaaaggcacgacgctgccaaaggcgattagcattgtcgccagatagaccttccagtgttcagccgccgggaaccctgcatcagccagttgtccgggcagggcaacaaacgtgctcatcagcaaaatatgcagacacataatgccaaagttgagtttcagcagccgcggttccgccagcactttactgaaactgcctttcaccattccggactcacgattaagtacgtgagtgctactgttgggcacaacccaaatggtcaacgcaatgccggtcgttgccagaatagcgatcatccagaacagcgcgtgcagcccaagtttgtgagtgatgatcgggccaagcaccatcgcaatggcaaaggtaatgccaaagctcacgccgataaacgccatcgctttggtgcggttttgttcgcgcgtgagatcggaaagcagcgccataacggcggcggcaattgctccagagccttgtagcgcccggcccagaataattccccagatggagtcggaaagcgcagcgataacgctaccggcggcaaacaccgccagcccaccgacaattaatggtttgcgaccaatgcggtcggaaagcaggccaaacggaatctgaaaaacggcctgagtcagaccataaataccaatggcaataccgattaatgcttcgctggcaccttgcagagccatgccgtacgtggtcagaaccggcagaaccataaacatgcccagcatgcgcaagctgaatacggtccctaaaccccaggtcgcgcgcctctcacctggcgtcattttataatcgttcattaccacctctgttttaaattcgcgactagtgtaaagcggcaaacgaatggggtaaacatgcggattttttagtaaatatttcgagagggatatgtttctaatgctaagaaaaaaggtgccgtagcacctttttaatagagaggttttgttaccacacagcagccagcagcgtatggctgtccggtaccataaaatcaacggacatcatcacgctgagggcagtgatggcgatgatagagaagccgaacagcttgcgcgcccagattctgtcatcagcaactttataaccgcgcagagccatacctaaccaccagacgctaaccgccgcggcgaccaccagatatttatacccagcgtaaccgccaagagagagcatcagcgtggcaacggcaaaggcgatgatatacagcgtgatgtgattcttcgccacgctaatgccttttaccactggcaataccggaatgtttgccgcctggtaatccttaaagcggaaaatggcgatggcataggagtgaggcatctgccacaggctgaagatagccagcaggatcgctgcgccgctatcgaactcaccggttaccgcacagtagccgatcaccggcggcgcagcgccggagaggctaccaatcaacgtgccgtagacagagtggcgtttcatgtacaggctataaacgccgacataaaccacaaagcccatcacccccagccagcaggccagcggattcgcgccaaaccacagcagcataaagccagcaatacccagcaacgtggcgtacaccaggctgacagcaggagagatcaggcctttcaccagcacccgattcttcgtcctttccatctttctgtcgatatccctgtcgatgtagttgttaaacacacaaccgctcgccacaaccagactcaccccaaccagcgtgtagataaacaggggataatcaatgctgcccttactggccagcaggaatcccccaatcacgctgatcaggttgccaaagatgatgcctggtttcgttacttgcaggtattgcttaaacatcataaccgccgctcttagtgcatcatcatgttgtagttgaggttccacataatccagatggagcctacaaccaggatagcgatgattagcacggtgaagacaaacgccgtcatgttccagccttcatcacttttggtattcatgtgcaggaagcacaccagatgcaccagaacctgtaccactgccattgccaggattgttcccagaattacggccggagaggcagctcctgtcatcaccatccagaacggaatcaccgtcagaatgatgctcaggataaagcctgtcatgtaggtttttacgctgccatgggacgcgccgctgtgatcggtagaatgactcattacatcgcccccatcagataaacaacagtgaacacacagatccaaaccacatccaggaagtgccagaacaggctcaggcacatgatgcgggtacggttagtgctggtcaggccgcgacgggcgatttgcaccatcagcaccgccatccagataagaccagaagtgacgtgcagaccgtgcgtgccgaccagcgcaaagaacgcactcaggaagccgctgcgatccggacccatgccgttaacaatcaggtgatggaattcatagatttccatcccgataaatccggcaccaaacaaccaggtcaacgccagccaggagataacctggcttttgttgtttttgtacatggcgatagccgccatgccgtaggtgatggagctgaacaacagcaagaaagtttcaaccagaacgaacggcagttcgaaaatgtccttacctgtcgggccgcctgcggtgccgttcaccagaacggcataggtagcaaacaagatagagaacagaatgcagtcgctcatcaggtagatccaaaatccgaagattttggttccgcctgcatcgtggtgcccgtgttcgtgcgcgtgggcagtcgcgtgcgtcaaagtatcagttgccatttttcagccctgccttagtaatctcatcgaaatgctggttttccagtttttcgatttctgccaccggcacgtagtaatccacgtcctcgtcgaagcttttcacgatccaggtgatgatcatgcctgcgaagccaacaatcgccagccaccagatatgccagatcatggcgaaaccgaagatggtggagaaagctgcaatgacgatacctgcaccgctgtttttcggcatatgaatttcttcatagtggtcaggctttttatacgcttcgcctttctctttcatttcccagaatgcatcacgttcgtgaacgtgcggcactacggcaaagttatagaacggaggcggggaagaggttgcccactccagcgtacggccaccccacgggtcgccagtcaggtcacggttctggtcgcggtcgcgaatagaaacgtacatctgaataacgaggcagagaatacccagcgcaatcagtactgcaccgctggctgcaatcatcagcatggtgtggaactgcgggtcaatctgctggctcaaacgacgggtcatgcccatgaagcccagcgcatacagtggcataaaggcaacgaagaagccgatgatccagaaccagaacgcgcgtttaccccaggtttcgttcagtttgaaaccgaacgctttaggccaccagtaggtcatccctgcgaagcagccgaagaccacgccgccgatgatcacgttatggaagtgcgcaatcaggaacaggctgttatgcagaacgaagtccgcgcccggtacggccagcagcacgccagtcatcccgcccacgctgaaggtgacgataaaaccgatggtccacagcatcgcagaatggaacacgatgcggccctgatacatggtgaacagccagttgaagatcttcaccccggtcgggatggcgataatcattgtggtgataccaaagaaggcgtttacgttcgcgcccgcacccatcgtaaagaagtggtgcagccaaacgatgaagctcagcacggtgatacaggcggttgcccataccaggctggtataaccaaacagacgtttacggctgaaggttgccgcaatttcggagaacacaccgaaaacaggcaggatcaggatgtaaacttccgggtggccccaggcccaaatcaggttgatgtacatcatcatgttgccacccatatcgttggtaaagaaatgggtgcccagatagcgatccagggtcaacaacgcgacggtaaccgtcagaattgggaaggaagcaataatcagtacgttcgcgcacagacttgcccaggtaaatactggcatcttgaacatggtcatgcccggtgcgcgcatcttcagaatggtaacgaagaagttgataccggtaagcgtcgtacctataccggatagctggagactccatatccagtaatcgacaccgactcccggactgtactctattccgcttagcggtggataggccagccagccggtctgcgcaaattcgcccacgccgagagaaacgttaaccagaatcacaccaacaacggtaaaccagaagcttaagttgttgaggaacgggaacgcaacgtcacgcgcgccgatctgcagcggaaccaccaggttcatcagaccgataacgaaaggcatcgccacgaagaagatcataatcacgccgtgcgcggtaaagatctgatcgtagtggtgaggtggcaggaagcccgcttcgcccgcgctggcaagagcctgctggctacgcatcataatggcgtcagcaaaaccacgcagcaacatcacaatcgccacgatgatatacatgataccgaggcgtttatggtcgacggaggtcagccactctttccacaggtaggtccacttaccgaagtaagtgatcaggccaacgagcgccagacctcccaaaataatgccagcgatcgtaaccatgacgataggttcatggaacgggactgcatcaagacttaattttccgaacatctttattcttcctcaacccctttaatgggcggattccgcgtggctcatgtccatgccttccataccttcgtgtgcgctgtgctcaccttctggctgggtcatgtccatgctcttaccgtgagccataaacttgttaattacatcggcaaacaagtctggtttcacgttggagaaatattccacctggttgtattcgctaggcgcggccagtttttcgaacgcagccatgtcagacatggtgttcgggctctgcttcgcttttgcgacccactggtcgaatgcggcgcgatccggtgttgcaatagctttgaacttcatgccactgaagcccgggccgctgtagctggcggagataccgtcataagtgccgggttcgttggcgatcagatgcaggcgagtctgcataccggccatggcataaatctggctacccagacgcggaatgaagaaggagttcatcacggagttggaggtcactttgaagtacaccggagtgttcgccgggaaagcgatttcattcacggtagcaatgccctgttccgggtagatgaagaaccatttccagtccatggaaaccacttcgatggtaatgggcttctcgtcgtgtgccagcggcttgctaggctcaagagcgtgagtggttttccaggtcagtactgcaaggaagatgatgattaagataggtaccgtccagaccacagcttccactttattggagtgactccagttcgggctgtacttagcatctttattgctcgcacggtacttccaggcgaaaccaacagccatcaagattgcgggaataacgacaatcaacatcaggccaaatgccgtcagtatcagactacgttgctccagaccaatctgtcctttgggatctaacagcgcagaattacagccactgagcaatacagtgcctgcaaataaactcaaccatcccaaacttttattgtatttcctgagtctcatttaacgacctcaattccacgggatctggtggcgtttaaagtgtgtgggcattttacgggaaggttacattactgtaaacatgattaaattcctgttacttggatttggctgccaggtcacatatgttgcaaaacatatcaggttgattttaagaagctgttgcaaaagggcgttataacaaaaggggagtgctgaaggagtctgggcgggcaattggtataaccaatgtgaaataaaacaattatttaacaaataattatcattagagtgacaactgggtgatgagaaaataaagactcattagctgaatcgtgtaagaaaaatagaatttataaatggcgccaataatttccaaacgctaagccgcacaaaagaacaaatattaataagcgatactgatgtttatttagccgtaataattacggcgagtgattactacagctaaataatatttacagattacgtcagatgcgtttttcgtagcgccagataatccagcaaaccaccaagcacgacgccagaaagggcgactaaaaccccgacttccagcagagcaggcaggaaagagaagtgcgtcaaatccagcgcgtccatcgtcaatagcagtaaccacacggccaacaggctgacgcccgccgccagtgtccacatggcaaaggcataacctgccggatatgcggtacgggagataaagttgtcatttactcgtgtatattcaagcgtctggcggcaaaccagcagcaaaataagccctggtacggcagcggcgacggagaatagatagaatgtgctccagccgtgtgcttcaacaaaccaacccgccacggggccgacataaactcgccctacagcagaaagcgcactgagcagggcaaattgagtagcggaaaaactcttattacatagcgtcattaacagcgcgacaaaggcacttgtgcccatcccgccacagaggttttcgaaaaagacggctgcgcccatgctgtagagatgcttatcagtaatgctcagcagccagtaaccggcgttagacgcaccttgtaaaatgccgaaaatcagcagtgcccggaacagactcaggcgctgcatcaaaatcccaccgtacaatgcgccaacaatggtcgctagtaagccaagcgttttgttaaccacgcctacttcacccgcatcaaacccgacgccgcgaatcaaaaacgtggttgtcaggctcatggcgaatgcgtcgcccagcttatacagcacgataagaagcaaaataagccaggcattattgcgaccaaagaaatctcgcagaggtgcaacaaccgcttgttccagcgttttgggcacaggaatggtgtcggttggttctggtgcaagcaacgtcgcgataatacaggggatcaacagtgccgccattaaccagtacatgccctgccagcccagccatttatctgccagccacagggctaggccgccggaaaccagcatccctaaacggtaacccagcacgctgattgccgcgcccgcaccacgttcttctgccggaagcacatcggttttccacgcatcgaagactatatcctgggaagcagagcaaaaagcgatcaccactgccagcgccgccatccagcggagttgggtgcctggttcgagaaaacccatcgccgcaatggcgactaataacaggatttgcgtggcgagcagccaaccgcgccgccgcccaaaaaatggaggcgtgtagcggtccatcagcggactccagaggaatttaaaaacgtaagcctggcctaccagagagaagaaaccaatggttttgagatcgatattctcgaccgtcatccaggcctgtaaggtaccggatgtcagggcgagcggtagcccggaagcaaaacccaggatcagcaatatggcactacgcggctgttgaaaaatacgtaaatattgactggacatgggcgtctacaggcccggcttgcaccgggccagagggcagaaattaacgcgcgttctgcttgatgaattcgtggatgctggtgtcctgagacatatcagcgatggtatcggtcagcacactgttaaccgcatcggcgatatttttgttggaggcctggaacgcaccttcaacgttgtagctggcacgatagtttttggtcattttgttgccattctgcgcggtagcgatgatggcgatatccgctttggtcgcgatgttgtagcgcacgttgccctgggacacgtcagcatacagttggctaacgatgatttgcagattaaccgggccattcggaccaaccatgtaaccacgcgcggtcatctgtttttccagcacttcttgcagcaggaaacgcagatcgcgggaggcggtcagggtaacgatttgattatcgcgggtgacttttgccagcgcctgatcggtacgctgatcggcaccattaatgcttacggtgacgcccatcaggcttggatcctgctgtggcagtgtaatcgtcggggaaacttcaatagttgttggcggttttgcgcatcctgcaagcataaacagagcaactaacgggaagaggatttttttgaacatgttcgggctctcagagactcttaagcgtgtttggtaaaaattcccgccatcataacattgccaacggcgaggggaagtgggtaaggcatgtaaattcatcatgttgacgaaataatcgcccctggtaaaagaaacactgatgcgaggcctgtgtttcaatctttaaatcagtaaacttcatacgcttgacggaaaaaccaggacgaaacctaaatatttgttgttaagctgcaatggaaacggtaaaagcggctagtatttaaagggatggatgacatctcagcgttgtcggaggagatatttcatgatgatacgtgagcggatagaagaaaaattaagggcggcgttccaacccgtattcctcgaagtagtggatgaaagctatcgtcacaatgtcccagccggctctgaaagccattttaaagttgtgctggtcagcgatcgttttacgggtgaacgttttctgaatcgtcatcgaatgatttacagtactttagcggaggaactctctactaccgttcatgcgctggctctgcatacttacactattaaggagtgggaagggttgcaggacaccgtctttgcctctcctccctgtcgtggagcaggaagcatcgcgtaaaaacgcatttgcaactgtcggcgcttttccagtatgttgctaaagattttatgaaaaacggcctgcgggccgttttgttttgtctggattttgcgctttttgcccagcattcagacgaaaattgcccgggaattgtgaaaaaatacgcgacagcgcgcaataaccgttctcgactcataaaagtgatgccgctataatgccgcgtcctatttgaatgctttcgggatgattctggtaacagggaatgtgattgattataagaacatcccggttccgcgaagccaacaacctgtgcttgcggggtaagagttgaccgagcactgtgattttttgaggtaacaagatgcaagttagtgttgaaaccactcaaggccttggccgccgtgtaacgattactatcgctgctgacagcatcgagaccgctgttaaaagcgagctggtcaacgttgcgaaaaaagtacgtattgacggcttccgcaaaggcaaagtgccaatgaatatcgttgctcagcgttatggcgcgtctgtacgccaggacgttctgggtgacctgatgagccgtaacttcattgacgccatcattaaagaaaaaatcaatccggctggcgcaccgacttatgttccgggcgaatacaagctgggtgaagacttcacttactctgtagagtttgaagtttatccggaagttgaactgcagggtctggaagcgatcgaagttgaaaaaccgatcgttgaagtgaccgacgctgacgttgacggcatgctggatactctgcgtaaacagcaggcgacctggaaagaaaaagacggcgctgttgaagcagaagaccgcgtaaccatcgacttcaccggttctgtagacggcgaagagttcgaaggcggtaaagcgtctgatttcgtactggcgatgggccagggtcgtatgatcccgggctttgaagacggtatcaaaggccacaaagctggcgaagagttcaccatcgacgtgaccttcccggaagaataccacgcagaaaacctgaaaggtaaagcagcgaaattcgctatcaacctgaagaaagttgaagagcgtgaactgccggaactgactgcagaattcatcaaacgtttcggcgttgaagatggttccgtagaaggtctgcgcgctgaagtgcgtaaaaacatggagcgcgagctgaagagcgccatccgtaaccgcgttaagtctcaggcgatcgaaggtctggtaaaagctaacgacatcgacgtaccggctgcgctgatcgacagcgaaatcgacgttctgcgtcgccaggctgcacagcgtttcggtggcaacgaaaaacaagctctggaactgccgcgcgaactgttcgaagaacaggctaaacgccgcgtagttgttggcctgctgctgggcgaagttatccgcaccaacgagctgaaagctgacgaagagcgcgtgaaaggcctgatcgaagagatggcttctgcgtacgaagatccgaaagaagttatcgagttctacagcaaaaacaaagaactgatggacaacatgcgcaatgttgccctggaagaacaggctgttgaagctgtactggcgaaagcgaaagtgactgaaaaagaaaccactttcaacgagctgatgaaccagcaggcgtaatttacgcagcataacgcgctaaattcgcacaaaggcccgtcaccgccaggtggtgggcttttttttgtcatgaattttgcatggaaccgtgcgaaaagcctctttcggtgttagcgtaacaacaaaagattgttatgcttgaaatatggtgatgccgtacccataacacagggactagctgataatccgtccataaggttacaatcggtacagcaggttttttcaattttatccaggagacggaaatgagttacagcggcgaacgagataactttgcaccccatatggcgctggtgccgatggtcattgaacagaccagtcgcggtgagcgctcttttgatatctattctcgtctacttaaggaacgcgtcatttttctgactggccaggttgaagaccacatggctaacctgattgtggcgcagatgctgttcctggaagcggaaaacccagaaaaagatatctatctgtacattaactccccaggcggggtgatcactgccgggatgtctatctatgacaccatgcagtttatcaagcctgatgtcagcaccatctgtatgggccaggcggccagcatgggcgctttcttgctgaccgcaggggcaaaaggtaaacgtttttgcctgccgaatagccgcgtgatgattcaccaaccgttgggcggctaccagggccaggcgaccgatatcgaaattcatgcccgtgaaattctgaaagttaaagggcgcatgaatgaacttatggcgcttcatacgggtcaaagtttagaacagattgaacgtgataccgagcgcgatcgcttcctttccgcccctgaagcggtggaatacggtctggtcgatagcattctgacccatcgtaattgatgccagaggcgcaactgtgccgctatacttatccagggcggcacaacgctgtaagcggcttgcgcctgagaatggcatttgcgtcgtcgtgtgcggcacaaagaacaaagaagaggttttgacccatgacagataaacgcaaagatggcagtggcaaattgctgtattgctctttttgcggcaaaagccagcatgaagtgcgcaagctgattgccggtccatccgtgtatatctgcgacgaatgtgttgatttatgtaacgacatcattcgcgaagagattaaagaagttgcaccgcatcgtgaacgcagtgcgctaccgacgccgcatgaaattcgcaaccacctggacgattacgttatcggccaggaacaggcgaaaaaagtgctggcggtcgcggtatacaaccattacaaacgtctgcgcaacggcgataccagcaatggcgtcgagttgggcaaaagtaacattctgctgatcggtccgaccggttccggtaaaacgctgctggctgaaacgctggcgcgcctgctggatgttccgttcaccatggccgacgcgactacactgaccgaagccggttatgtgggtgaagacgttgaaaacatcattcagaagctgttgcagaaatgcgactacgatgtccagaaagcacagcgtggtattgtctacatcgatgaaatcgacaagatttctcgtaagagtgacaacccgtccattacccgagacgtttccggtgaaggcgtacagcaggcactgttgaaactgatcgaaggtacggtagctgctgttccaccgcaaggtgggcgtaaacatccgcagcaggaattcttgcaggttgatacctctaagatcctgtttatttgtggcggtgcgtttgccggtctggataaagtgatttcccaccgtgtagaaaccggctccggcattggttttggcgcgacggtaaaagcgaagtccgacaaagcaagcgaaggcgagctgctggcgcaggttgaaccggaagatctgatcaagtttggtcttatccctgagtttattggtcgtctgccggttgtcgcaacgttgaatgaactgagcgaagaagctctgattcagatcctcaaagagccgaaaaacgccctgaccaagcagtatcaggcgctgtttaatctggaaggcgtggatctggaattccgtgacgaggcgctggatgctatcgctaagaaagcgatggcgcgtaaaaccggtgcccgtggcctgcgttccatcgtagaagccgcactgctcgataccatgtacgatctgccgtccatggaagacgtcgaaaaagtggttatcgacgagagcgtaattgatggtcaaagcaaaccgttgctgatttatggcaagccggaagcgcaacaggcatctggtgaataattaaccattcccatacaattagttaaccaaaaaggggggattttatctcccctttaatttttcctctattctcggcgttgaatgtgggggaaacatccccatatactgacgtacatgttaatagatggcgtgaagcacagtcgtgtcatctgattacctggcggaaattaaactaagagagagctctatgaatcctgagcgttctgaacgcattgaaatccccgtattgccgctgcgcgatgtggtggtttatccgcacatggtcatccccttatttgtcgggcgggaaaaatctatccgttgtctggaagcggcgatggaccatgataaaaaaattatgctggtcgcgcagaaagaagctagtacggatgagccgggtgtaaacgatcttttcaccgtcgggaccgtggcctctatattgcagatgctgaaactgcctgacggcaccgtcaaagtgctggtcgaggggttacagcgcgcgcgtatttctgcgctctctgacaatggcgaacacttttctgcgaaggcggagtatctggagagcccgaccattgatgagcgggaacaggaagtgctggtgcgtactgcaatcagccagttcgaaggctacatcaagctgaacaaaaaaatcccaccagaagtgctgacgagcctgaatagcatcgacgatccggcgcgtctggcggataccattgctgcacatatgccgctgaaactggctgacaaacagtctgttctggagatgtccgacgttaacgaacgtctggaatatctgatggcaatgatggaaagcgaaatcgatctgctgcaggttgagaaacgcattcgcaaccgcgttaaaaagcagatggagaaatcccagcgtgagtactatctgaacgagcaaatgaaagctattcagaaagaactcggtgaaatggacgacgcgccggacgaaaacgaagccctgaagcgcaaaatcgacgcggcgaagatgccgaaagaggcaaaagagaaagcggaagcagagttgcagaagctgaaaatgatgtctccgatgagcgcagaagcgaccgtagtgcgtggttatatcgactggatggtacaggtgccgtggaatgcgcgtagcaaggtcaaaaaagacctgcgtcaggcgcaggaaatccttgataccgaccattatggtctggagcgcgtgaaagatcgaatccttgagtatcttgcggttcaaagccgtgtcaacaaaatcaagggaccgatcctctgcctggtagggccgccgggggtaggtaaaacctctcttggtcagtccattgccaaagccaccgggcgtaaatatgtccgtatggcgctgggcggcgtgcgtgatgaagcggaaatccgtggtcaccgccgtacttacatcggttctatgccgggtaaactgatccagaaaatggcgaaagtgggcgtgaaaaacccgctgttcctgctcgatgagatcgacaaaatgtcttctgacatgcgtggcgatccggcctctgcactgcttgaagtgctggaaccagagcagaacgtagcgttcagcgaccactacctggaagtggattacgatctcagcgacgtgatgtttgtcgcgacgagcaactccatgaacattccggcaccgctgctggatcgtatggaagtgattcgcctctccggttataccgaagatgaaaaactgaacatcgccaaacgtcacctgctgccgaagcagattgaacgtaatgcactgaaaaaaggtgagctgaccgtcgacgatagcgccattatcggcattattcgttactacacccgtgaggcgggcgtgcgtggtctggagcgtgaaatctccaaactgtgtcgcaaagcggttaagcagttactgctcgataagagtttaaaacatatcgaaattaacggcgataacctgcatgactatctcggtgttcagcgtttcgactatggtcgcgcggataacgaaaaccgtgtcggtcaggtaaccggtctggcgtggacggaagtgggcggtgacttgctgaccattgaaaccgcatgtgttccgggtaaaggcaaactgacctataccggtagcctcggcgaagtgatgcaggagtccattcaggcggcgttaacggtggttcgtgcgcgtgcggaaaaactggggatcaaccctgatttttacgaaaaacgtgacatccacgtccacgtaccggaaggtgcgacgccgaaagatggtccgagtgccggtattgctatgtgcaccgcgctggtttcttgcctgaccggtaacccggttcgtgccgatgtggcaatgaccggtgagatcactctgcgtggtcaggtactgccgatcggtggtttgaaagaaaaactcctggcagcgcatcgcggcgggattaaaacagtgctaattccgttcgaaaataaacgcgatctggaagagattcctgacaacgtaattgccgatctggacattcatcctgtgaagcgcattgaggaagttctgactctggcgctgcaaaatgaaccgtctggtatgcaggttgtgactgcaaaataatgacctcgcgcaaaatgcactaataaaaacagggctggcaggctaattcgggcttgccagcctttttttgtctcgctaagttagatggcggatcgggcttgcccttattaaggggtgttgtaaggggatggctggcctgatataactgctgcgcgttcgtaccttgaaggattcaagtgcgatataaattataaagaggaagagaagagtgaataaatctcaattgatcgacaagattgctgcaggggctgatatctctaaagctgcggctggccgtgcgttagatgctattattgcttccgtaactgaatctctgaaagaaggggatgatgtagcactggtaggttttggtacttttgccgttaaagagcgtgctgcccgtactggccgcaacccgcagaccggtaaagagatcaccatcgctgctgctaaagtaccgagcttccgtgcaggtaaagcactgaaagacgcggtaaactaagcgttgtccccagtggggatgtgacgaagttcaagggcgcatctactgatgtgccttttttatttgtattcggtgactttctgcgtcttgtgggctgacaattgcccccgtttcttgtcacaataggcctttgcgcgcatcgatacgttgcgtgaggtacacagtcatctacagcggagtgttgttacaccatgatggacagcttacgcacggctgcaaacagtctcgtgctcaagattattttcggtatcattatcgtgagcttcatattgaccggcgtgagtggttacctgattggcggaggcaataactacgccgcaaaagtgaatgaccaggaaatcagccgtgggcaattcgagaacgccttcaacagcgagcgtaatcgcatgcagcaacagctgggcgatcaatactccgagctggcagcgaacgaaggctatatgaaaaccctgcgtcaacaggtgctgaatcgtctgatcgacgaggcgctgctggatcagtacgcacgtgagctgaaactgggtatcagcgatgagcaggttaaacaggcgattttcgcgaccccagccttccaggttgacggcaaatttgataacagccgctataacggtatcctcaaccagatggggatgaccgccgatcagtacgcccaggcgctgcgtaaccagctcactacccaacagctgattaacggcgttgccggtaccgattttatgctgaaaggtgaaaccgacgagctggcggcactggtcgcgcaacaacgcgtggtgcgtgaggcgactatcgatgttaacgcgctggcggcgaagcagcctgtgaccgaacaggagattgccagctactacgaacaaaacaaaaacaatttcatgacgccggaacaattccgcgtgagttacatcaagctggatgccgcaacgatgcagcaaccggttagcgatgcggatatccagagctactacgaccagcatcaggatcaattcacccagccgcagcgtacccgctacagcatcatccagaccaaaactgaagatgaagcgaaagcggtacttgatgagctgaataaaggcggtgattttgctgcattagccaaagaaaaatctgccgatattatctctgctcgtaacggcggcgatatgggttggttagaagatgccactatcccggacgaactgaaaaatgctggtctgaaagaaaaaggccaactgtctggtgtcatcaaatctagcgtcggtttcctgattgtacgtctggacgacattcagccagcgaaagtgaaaagcttagacgaagtacgtgacgacattgcggcgaaagtgaaacacgaaaaagccctcgatgcgtactacgcgctgcagcagaaagtgagcgatgcggcaagcaacgacaccgagtctctggccggtgcagagcaagctgccggcgttaaagccactcagacgggttggttcagcaaagataacctgccggaagagttgaacttcaagccggttgccgacgctatctttaacggcggtctggtaggtgaaaacggcgcgccgggcatcaactctgacatcatcaccgtagacggcgaccgcgcattcgtgctgcgcatcagcgagcacaaaccggaagcggtgaaaccgttggcagatgttcaggaacaagttaaggcattggttcagcacaacaaagctgaacaacaggcgaaagtggatgctgagaaactgctggttgatttgaaagccggcaaaggtgcggaagctatgcaggctgccggtctgaaatttggcgagccgaaaaccttaagccgttccggtcgtgacccgattagccaggcggcgtttgcactgccactgccagcgaaagacaaaccgagctacggtatggcgaccgatatgcaaggtaatgtggttctgctggcgctggatgaagtgaaacaaggtagtatgccggaagatcagaaaaaagcgatggtgcagggtatcacccagaacaacgcacaaatcgtctttgaagctctgatgagtaacctgcgtaaagaggcgaaaatcaaaattggcgatgcgctggaacagcaataatcctgaagccgcctcgcaaaaaaatgcgttgcagctgtaacaagaaaaggtcgctttcgcggccttttccatttctgaacattgccatttgtttactgttttcactgccgttaaggtgattccactgttaacaaacaaggagaaaacagtatgaaacacggaattaaagcactgctcattaccctgcccctggcctgtgccggaatgtctcatagcgcgctggcggcagcttctgtggcgaaaccgacggcggtagaaaccaaagcggaagctcctgcagcacaaagtaaagcagcagtaccggcgaaagccagtgacgaagaaggcacccgggtcagcattaataatgccagcgcggaagagctagcccgcgcgatgaatggcgttggcctgaagaaagcgcaggcgattgtcagttatcgcgaagagtacggtccgtttaaaactgtggaggatctaaagcaggtgccggggatgggcaatagcctggtggaacgtaatctggcggtattaaccctgtaattaatttgcatagtggcaattttttgccagactgaagaggtcataccagttatgacctctgtacttataacaacaacgtaaggttattgcgctatgcaaacacaaatcaaagttcgtggatatcatctcgacgtttaccagcacgtcaacaacgcccgctaccttgaatttctcgaagaagcccgctgggatgggttggaaaatagcgacagttttcagtggatgacggcccataacatcgccttcgtcgtggtcaatatcaatattaactatcgtcgcccagcggtattaagtgacctgttaactattaccagtcagttgcagcaattaaacggtaaaagcggcatcttaagccaggtcattacactggagccggaagggcaggtggtagcggatgcgcttattacgtttgtttgtattgatcttaaaacgcagaaagcattagctctggaaggggaattgcgcgaaaagctggagcagatggttaagtaaacgttttgtggtgccggatgctcaagccgcatccggcgacacccggaataattacctcaacccggttttctgcttcatcgctgccatcaccgtcggtttatcggccagataatgattcaaaccgttggcgcgtaaattacatgccgcacaatgaccgcaaccgtcgcctttaaagccgttatagcaggtcaacgtttcgttacggactaaatccagtttgccgtaataatctgccagcgcccaggtttccgctttatcaatccacatcagcggcgtttcaaaacgaatatctttcgccatgcccaaactgacggcatggtttagtgctttcacaaactcatcgcggcaatccgggtagccggagaaatccgtttcgcagacgccagtaattacggcttctgcttttacctgatacgcatatattgccgccagcgtcaggaacaaaatattacgccctgggacaaacgtattcgggataccatcggcttcaggttcataatcaggcaccggaatgctgtcacgcgtcaggctactgaccgccagctcgttgagcagggtgacatccagcaccttatgcgcgcgtgcccccagtttcagcgccagttcgcgtgccacgtcgatttctgcgcgatgccgctgaccgtaatcgaacgtcacgcaatggacttcatcatattgttgtaatgcctgcaccagacaggtggtggaatcctgacctccactgaacacaacgacagcacgtttcatagataatcctgcttgaacaataaaagcgttatggtaacgcctgcgattaacccggaccagctattcattggcttggcgcgggaagccaggcttcggtaaattcaaaccagccgcgcggtgtcagtcgcacaccgttcacgccgggaggggcactaatgcgatagtgatagttgaacagcggcgtcagcgtcgcatctgtcattaactggctaaaaaccgctttcagggcattaaatcggttttcttcatcaggcattatttgcacggcatccagtgtgctttgtagatgtgcgtatgctggagcgtcgaaaacatgtggccacagcggatcgcagcgcagccattgctccagagtatattccggtgcttcgccaattaatctgtcgcccatcatgaggtctgcgtgtgcctgtagggtcgtgtcgtcccagttttttgcgttatgaaaaataattgtgagttcacagccttccgctgccagtgtcgcctgtaggcgttctgccatggtatgaagttctatcggtaggtgataaaccagcgtcaaggttttcggtagtttgacttcatccggtacctgccaatgcggaatagtccagcctggcagtaatgcatgactggcggtgatcaggttttctccgacttctaacgtttgtaataaaccggattgatgaataatggagatcacttttcgcgcctgccagagggagagtcggggacttttgcgcaacgtcaaatagcaaaaacctaaactgatgccgctactgacctggctgacccgttgcagctcctccggtttgccgatggtgatttgcacgggatgccgacaactggttcccaaatctttttcgaaaagcggcggagttatccagtactcaaccgctttaagcagcggatgacgtaaatggtaataatcatggctttccaggcgcaccagctctgctgtgaattgtgttaagcgaaaaggacccgtgccgatcagtgggaattgcggatgcgccagatggctgcaatagctcgccagccggtgcgcaagccagtaatcagggcgatgtaaaaagaaggtcagacactgcggatgggtgacttcaatacgcttcacgctaataaataattgatccagtgctggcagttgtaacagcatcaataatcgctggtgtaagtgactggcttttactgcatcgccgttatgccagtgtagggtactacgaagataaaagtcccagcgtaacccgtcagtagaggtttcccagtgatgcgctaaatcgccaatcgggcgctgagtattattatcgaagcgggtcaggccggaaaatatctgcccggcgagatgctgctcggcacggccgggcaaaaagcctggttgtagcggttcgagcgggcgatagtagggaatacgcaacgtgggtgtatcgttttgccattgtccgcccataaacggctgtaacagagtgcgcagctcacctggggccagttgcgccagctccagcacatcttgctgctttccggtttccagtgcctgttccatcatcgcattgcgtaggctttccggcgtgaccagaaagcgtaattgtccgcgctttccgcgtccactctgcgcctgccactccagccatcccgcctcctgtgcctgacgcaacagcgtacgaacatggcgttcgctgcaaaaacagcgttcggccagttcgctgacggtgacggtttgcggctttccggcggaaggttgccacagacgttgatactggttaagacggttgagcaatcgcatataaacccggaacaatattatttaactattcactattacttccgtatatatcaggtgatactcaatcaccattaaccgtgtcacagagtggagaaagaaatggctcgtctggcagcatttgatatggatggcactttattgatgcccgaccatcatttaggtgagaaaaccctctctactttggcgcgactgcgtgaacgcgacattaccctcacttttgccacggggcgtcatgcgctggagatgcagcatattctcggggcgctaagcctggatgcgtatttgattaccggcaacggaacgcgcgtgcattctctggaaggtgaacttttacatcgtgatgatttacctgcggatgtcgcggagctggtgctgtatcagcaatgggatacccgagccagcatgcatatcttcaatgacgacggttggtttaccgggaaagagatccctgcgttgttgcaggcatttgtctatagcggttttcgttatcagataatcgatgtcaaaaaaatgccactcggcagcgtcaccaagatctgcttctgtggcgatcacgacgatcttacacgcttgcagatccagctatacgaagcattaggcgagcgtgcacatttgtgtttttccgccacggattgcctcgaagtgctgccggtgggctgcaataaaggcgctgcattgacggtgctgacccaacatttaggtttaagcttgcgcgattgcatggcctttggtgatgcgatgaacgatcgcgaaatgttagtcagcgtcggtagcggatttattatgggcaatgcgatgccgcaactgcgcgcggagctcccgcatttaccggtgattggacattgccgaaatcaggctgtctctcactatttgacgcactggctggactatccacatctaccttattcccccgaataacgagatcccttccagcaccgggcaattgcccggttttttttgcgttgaatttgtcattttgtgccgtggtgtttaaaccgcacagaataaattgtcgtgatttcacctttaaaataaaattaaaagagaaaaaaattctctgtggaagggctatgttagataaaattgaccgtaagctgctggccttactgcagcaggattgcaccctctctttgcaggcactggctgaagccgttaatctgacaaccaccccttgctggaagcgcctgaaacggctggaggacgacggtatccttatcggcaaagtcgccctgctggatccggaaaaaataggcctcggcctgaccgcttttgtgctgataaaaacgcaacatcacagcagcgaatggtattgccgctttgtcacggtggttaccgaaatgccagaagtgctggggttctggcgcatggctggtgaatacgattatctgatgcgcgtccaggttgccgacatgaaacgctacgacgagttttataagcgtctggtaaacagcgtgccggggctgagcgacgtcacttccagcttcgcgatggaacagattaaatacaccacttctttacccatcgaataaatatccagaatcaggtcaggacacaacgcgtgcgattatttgctcaattaagctggtatttccgtcgggaatggcgtcgctatctcggggctgtcgccttgcttgtcattatcgcgatgctgcaactggttccgccaaaagtggttggtattgttgtcgatggcgtgacagaacaacactttactaccgggcagatcctgatgtggatcgccaccatggtgctgattgccgttgtggtttatctcctgcgttacgtctggcgggtattgctgtttggtgcgtcttatcaactggctgttgaactgcgtgaagattattaccgtcagctaagccggcagcatcctgagttttacctgcgtcatcgcaccggtgacctcatggctcgtgcgaccaatgacgtcgatcgcgtcgtgtttgccgccggagaaggggtgctgacgctggtggatagtctggtgatgggctgcgctgtgttgattatgatgtctacgcaaattagctggcagttgaccttattttccctgttgccgatgccagtgatggcgatcatgattaagcgcaacggcgatgctttgcatgaacgctttaagctggcacaggcggcgttttccagtcttaatgaccgcacccaggaaagcctcaccagtatccgcatgatcaaagcctttggtctggaagatcgccagagcgcgttatttgccgcggatgccgaagataccggcaaaaaaaacatgcgggtggcgcgtattgatgctcgtttcgacccgaccatctatatcgcgattggtatggcgaacttgctggcgattggcggcggtagttggatggtggtgcagggcagtttaacgctgggccagctcaccagttttatgatgtatttaggtctgatgatttggccaatgctggcgctggcatggatgtttaacattgtggaacgtggtagtgctgcgtacagccgtattcgcgcgatgctggcggaagcgccggtggtgaacgatggtagcgaacccgtgccggaagggcgtggcgaactggatgtaaatattcaccagttcacgtatccgcagactgaccatcctgcgctggaaaacgtcaatttcgccctgaaacccggtcagatgctgggtatctgcgggccgactggttccggcaaaagtaccctgttgagcctcattcagcgtcatttcgacgtcagcgagggggatattcgctttcatgatattcctctgacgaagttacaactcgatagctggcgtagccgcctggcggtagttagccagacgccattccttttttctgacactgtggcgaataacatcgcgctgggttgcccgaatgccacccagcaagagattgagcatgtcgcgcggttagccagcgtacatgacgatattttgcgtctaccgcaaggttacgatacagaggtgggcgagcgcggtgtgatgctttccggcgggcaaaaacagcgtatctccattgctcgtgcgttattagtcaacgcggaaatcctcatccttgatgatgcgcttagcgcggtggacggacgcactgagcaccagatcctgcataacctgcgtcagtgggggcagggaagaacggtaatcatcagtgcccatcgcctttctgcactgacggaagccagtgaaattattgtgatgcagcacggacatatcgcccagcgtggcaatcatgatgtgctggcacaacaaagcggctggtatcgcgatatgtatcgctatcaacaactggaggcggcgctcgacgacgctccggaaaatcgcgaggaggccgtcgatgcgtaactaaaaatcgcgaggaggccgtcgatgcgtagttttagccaactgtggccgactctcaagcgcctgttagcgtacggtagcccgtggcgtaaaccgctggggattgcggtcctgatgatgtgggttgcggcggcggcagaagtcagtgggccgctgcttatcagctattttatcgacaatatggtagcgaaaaataacctgccgttgaaagtggttgcagggctggctgcggcgtatgttgggctgcaactgtttgccgccgggctacattacgcgcagagcctgctgtttaatcgggcggcagtaggcgtagtgcaacagttgcgtaccgacgtgatggatgctgcgttacgccagccattaagcgagtttgatacccaacccgtcgggcaggtgatttcccgcgtcactaatgacactgaagtgatccgcgatctctacgttaccgtagtggcaactgtcctgcgcagtgccgcgctggtgggcgcgatgctggtggcgatgttcagcctcgactggcgaatggcactggtggcgataatgattttcccggtggtgctggtggtaatggtgatataccagcgttacagcacgccgattgtccgtcgtgtgcgcgcctatttggcggatatcaacgacggctttaacgaaatcatcaatggcatgagcgttatccagcagtttcgtcagcaggcgcgatttggcgaacgtatgggggaggccagtcgtagtcactatatggcgaggatgcaaaccctgcgcctcgacggttttctgctgcgtccgctgctgagtctgtttagtagcctcattctttgtggcttgttgatgctgtttggcttctccgccagcggcaccattgaagtgggcgtgctgtatgcgtttatcagctatcttgggcgacttaacgaaccattaatcgaactgaccacgcaacaggcgatgctgcaacaggctgttgttgctggtgagcgcgtgtttgaactgatggacggaccgcgccagcaatatggcaatgatgatcgcccgttacagagtggcaccatcgaagtcgataacgtgagttttgcttatcgcgatgacaatctggtgctaaagaacattaatctctctgtgcctagccgcaattttgtggcgctggtcgggcataccggcagtggcaaaagcaccctcgccagtttattgatgggctattacccgctaacggaaggtgagattcgccttgatggtcgtccattaagtagcctaagtcacagcgcgctgcgccagggcgtggcaatggtgcagcaagatccggtggtgctggcggataccttcctcgccaacgtgacgctggggcgggatatctccgaagaacgcgtctggcaggcgctggaaaccgtgcaactggcggagctggcgcgtagcatgagcgacggtatttacacgccgctgggcgagcaggggaataatctcagtgttgggcaaaagcaactgctggcactggcgcgcgtgctggtcgagacgccgcaaatcctgatccttgatgaggcaaccgccagcattgactccggtactgaacaggcgattcaacatgctctggcggcggtgcgtgaacataccacgctggtagtgattgctcaccgcttaagcaccattgttgatgccgacaccattctggtgcttcatcgtgggcaagccgtggagcagggcactcaccagcaactgctggcggcccagggacgctactggcagatgtatcaactgcaacttgcgggcgaagagctggcagccagcgtgcgtgaagaggaaagtttgagcgcctgaatagcgcaatatttcatcgttggtgcaaaaatgtaacgcactgtgcactgtcatagtgcgttttcattttcaaacttcttaacttcctgctctctttctcgtttttcatttctggcacaccgcttgcaataccttcttcgtgtagcagaaccattaccgaattctgaccggaggggatctatgaagctggtgaccgtgataatcaaaccattcaagctggaagacgttcgtgaagcgttatcttccattggtattcagggcctgaccgtcaccgaagtgaaaggtttcgggcgtcagaaagggcatgccgagctgtaccggggggcggaatacagcgtcaatttcctgccaaaagtaaaaattgatgtggcgattgctgatgaccaactcgatgaagtgatcgatatcgtcagtaaggcggcttacaccggaaaaattggcgacggcaaaatcttcgtcgctgaattgcaacgcgtcattcgtattcgtaccggcgaagccgacgaagcggcgctgtaatctctggcacacagcaacaggaacgaaaaatgaagatagcgacgataaaaactgggcttgctagtctggcgatgcttccgggactggtaatggctgcacctgcggtggccgataaagccgacaatgcgtttatgatgatttgtactgcgctggtgctgtttatgactattccggggattgccctgttttacggtgggttgattcgcggcaaaaacgtgctgagcatgctgacgcaggtgacggtgacatttgcactggtctgtattctctgggtggtttacggttacagcctggcgtttggtgagggcaacaacttcttcggcaacattaactggttgatgctgaaaaacatcgaactgacggcggtgatgggcagcatttatcagtatatccacgtggcgtttcagggaagctttgcctgcattaccgtcggcttgatagttggggcgctggcggaacgaatccgcttcagtgctgtgttgattttcgtggtggtatggctgacgctctcttacattccgattgcgcatatggtgtggggcggtggtttgctggcttctcacggtgcgctggatttcgcgggtggcaccgtggtgcacattaacgccgcaatcgccggtctggtgggcgcgtatctgataggaaaacgcgtgggcttcggtaaagaggcgtttaaaccgcacaacctgccgatggtcttcaccgggactgccattctctatatcggttggtttggctttaacgccgggagtgcgggcacggcgaatgaaatcgcggcactggcatttgtgaatactgtggtcgcaacggcggcggcaattcttggctggatcttcggtgaatgggcgctgcgtggtaagcctagtctgctgggggcgtgttctggcgcgattgccggtctggtcggcgtgacgccagcctgcggctacattggggttggcggcgcgttgattatcggcgtggtagctggtctggcgggcttgtggggcgttaccatgctcaaacgcttgctgcgggtggatgatccctgcgatgtcttcggtgtgcacggcgtttgtggcattgtcggctgtatcatgaccgggatttttgccgccagcagcctgggcggcgtgggcttcgctgaaggtgtgacgatgggccatcagttgctggtacagctggaaagcatcgccattacgatcgtctggtccggtgttgtggcatttatcggctacaaattggcggatctgacggttggtctgcgtgtaccggaagagcaggagcgagaagggctggatgtcaacagccacggcgagaatgcctataacgcgtaacaagcactgcaaaaaacagccggacggttttcacctccggctatttttttaattgtgattacgcatcaccccttcctgaacggtgctggcaaccagtacgccgtcttgggtataaaactcaccgcgcacaaagccacgtgcgctggacgcgctggtgctctccacgctatacagcagccattcattcaaattaaacgggcgatggaaccacatggaatggtcaatggtggcaatctgaatccccggttcgagaaaaccgatgccgtgcggctgtagagctaccggcaggaagttaagatcagaagcgtaaccgagcagatactgatgaacgcgcaggtcatccggcacgctaccatttgcgcggatccacacctgacgatgtggttctgcgacgtgacctttcagtgggttatgaaactccaccggacggacttccagcggacgatcgcagatgaatttatctttcagcactggcggcagcaggtgcgccaggctttgggcgatttgcgtttcgctagggaggccatcaggcgctggcgcggacggcattgttttttgatgttcgaaacccgcttctggtgcctggaaagaggcagtcatataaaaaatcggtttgccgttttgaatagcagcaacccggcgggcgctgaagctgttaccgtcacgcagcgtttcgacatcataaataatcggcttcttactatcgccagggcgaagaaagtagctgtgaaagctatgtaccagccgctcttcagggacggtctcttttgcagcatacaaggcctgacccacgacctggccgccaaacacctggcgtaaacctaaatcttcactctggccgcgaaagagtccttcctcaattttttccagatttaacaatgtcagtaaattttttagcgcctgactcatataactctccagtaacaaagctgccgcagcaagccaaagtgagttgagtataacgcaaatttgctactggtccgatgggtgcaatggtctgaattacgggctaattacaggcagaaatgcgtgatgtgtgccacacttgttgacgttactattttgttaaccactcttccggcgaggaaagttagcccgctggtgcattgataataaggagaaatgaatgaaactcgtgcacatggccagtggtttagcggttgcgattgcgttggcggcttgcgcagataaaagcgcggatattcagacgccagcaccggctgcaaatacgtctattagtgcaacacaacaaccagctatccagcaaccgaatgtctccggtaccgtctggatccgtcagaaagtcgcactgccgcctgatgctgtgctgaccgtgacactttctgacgcgagcttagccgatgcaccgagtaaagtgctggcgcagaaagcggtgcgtactgaaggtaaacagagtccattcagctttgttctgagttttaacccggcagatgttcagccgaacgcgcgtattctgttgagtgcggcgattaccgtgaatgacaaactggtatttatcaccgataccgttcagccggtgatcaaccagggcggaactaaagccgacctgacattggtgccggtacagcaaaccgccgtgccggttcaggccagcggtggcgcaacgactaccgtacctagcactagtccaactcaggtgaatccgtctagcgcagttccagctcctacgcaatattaagcgacgttaaccctctccgcccggagagggttagtagttccagcgataacgctgcaagtcgatttgcccgcttccgcttaccatcacaccttctgccagtaatgcctgtcgctgacgctgtaaatccggtccggttaggctaattgtgccgtggcgattaaccacccggtgccagggtaaggtgctgccttcagggagacgctttaacacaccgcccacctggcgcgcggcgcgggggcttcccgccagtttcgccacatcaccgtaagtggtgacatagccttcgggaatagcggcgacgatttgccagacgcgttggggaaaactatcttctttttccatcttttcttcctgaggtaatttttcagcataatctggaaaaacgccgctgtgaagtcgcattgcgcaagaaaccagcatctggcacgcgatgggttgcaattagccggggcagcagtgataatgcgcctgcgcgttggttctcaacgctctcaatgggggctctgttggttctcccgcaacgctactctgtttaccaggtcaggtccggaaggaagcagccaaggcagatgacgcgtgtgccgggatgtagctggcagggcccccacccatttctgcctcccaccgtttcgtcaaaaaatcccaacatggctaaactttaaccacaactgacgtcgcaagaattgtctggctgcgcagtacgcttcggaggtatgtctgatgaagtatgttgatggttttgtggttgccgttcctgccgataaaaaggatgcctatcgggaaatggccgctaaggctgcgccattgtttaaagagtttggcgcgcttcgtattgtcgaatgctgggccagcgatgtaccggatggcaaagtgaccgattttcgtatggcggtgaaagcggaagagaatgaagaggttgtctttagctggattgaataccctagtaaagaggtccgcgacgctgctaatcaaaagatgatgagcgacccacggatgaaagagttcggcgagtccatgccgtttgacggcaagcgaatgatctatggcggattcgagagtatcatcgacgaataagtagcgtgacgggctgtgcggcgtgccgtcagcccaaaaattcacaaatgttgctcggcccagcgtaagaaatcttctttcggtaatgccttgctgtagagccagccctgaccgtagtgcacgccatgctggcgtaaccactcttcttgtttactggtttcgattccctccgctaccattttcagtttcagtgtttttgccatttcgatgatatgcggcgtgacatttttatattccagcgcatcaacgaaagatttatcgatcttcagaatgtcgacatccagatcctgtaaataacttaaactactataccccgtaccaaaatcatcaagataaatttcatggcccgcctcccggtagcgagaaattatcggggcgctggttttcggatcggcaaactcgcgttcagtgagttcaagcgcgatctgtctgggattaacctgatagtgattgatcatgtcacgcagcaattgcgggattttttcgctggtgagcacgggggattcaagattgatgctaatatgctgctgtggatgctgacgcagccagtcgcccatatcttcaaagacgcttcttataatcagtagcgtcaatggctcagaaaggcccgtttgctgtgccagcggaataaaactatctggactcaaccaactaccgtctgtctgcggccagcgcgccagtgcctcagcaccgacaattttgccattggctaaggagacaatcggctgatagtgcacgcaaatatcacgattttcgatagcatcctgcagccgatgatgcggactctgaatacggcgcaaaatacgcagcacaaacatcgctgccagcaggccaatcaccaacccgagcggtaaccaaataaagacttgccgatgccagcctttctgcaacattttcgtactagcccatgtgatgatgctaatattcatctccggtaagggcaggatatcgtaaatgattccattattttcgatatgctcaccgggtgttttttgtagcctggtaataattccctgagcaatttcatcgctgctggttatgacaacgttatgggcattgccaataatggcggcatcaatttgccaactgctatagggaatgacatcaataaaggaagcggggtcgatcatgacgacataatgtgccgttcccatggcgaccatgtaacggataatgcctaaatcgttatggcttgttaaccagacacgataaccatctttgctaattttacctggctcggggaaggtatcgggcggactttcatgctccagagagctacactggggaacgttgttatcgatataagccacttcctgaatatagcgataactgtaagatacccgacgcatttccatgagatgggcttcgctacaggcagcgccttgccatctttccagctcctgcagcgcatctttcccttgtgtcgccaccttattggctcgaatagcgacgcgggaggaataggtatccagctcttcaataaagcttgtttctacctgctgatgggccagccagatgcttaagccgacaggcagcaatacactaagaatcagtactccgctaataaggccgaccagatgtcgtgttctcaccagcatatccttattaacacagtgtagggaaagtatatctgattgtggaaaaaggctggctggagataaggaggtagagctggtatttcatgaagtgatgggtggaaacgatcattgtcatttgaccaggcgcagagctttacgcctggtatgtaaccctaacttaagatgtactttcggcgcgagcgagggtaaaaatatcgtaaaaagacagttcacctttacggacgatcattttttgcagttgttccttatgaacatccgcgacacgcggagagttcaagatggcttcaaccagcgcggcaggtacaaagcgcgtgttgtaccattcgccgttatagcaaacgcggaaatccagcacgtcgatatcttcatagcggtagcgtgggtagacatcgaaaaagaagaaaccattaagcaggataaataatacaaccagtagccagacagagccactcagcgtttcggactgcaacatcaccgccagggtggcaaaaaaagcaacgtacataccgataaacagccccggatgtttacggataaaactgatactaaagcggggtttgttgtcgcgtttttcgcgggtattcagagactcaatcgtttcggtcagcaggcgttgtatttcggtcatcgtttgccttcgtggtatctgcaactttccagggaacaccctattttaacgtgggaatagtagaggggaagtaacagatctaccacaattttgcataacagttgcgaaaaaccgattacaattttttaattattctggctggattaccgcccacgacaacgttgtccgggacatcttttgtgacaactgcaccactggctaccacgacgttatcaccaatggtcacaccagggttaatgaccgcgcgtccgccaatccagacgttattaccgatggtgacgggtttccccagttcagcaccgctattacgtgctacagggtcgatgggatgtgttgccgtgtagatatgaacgcctggtgccaacatacagttatcaccgatgcgaatagggcagacatcaagcatcacgcaatcgaagttggcgaaaaaattattaccgagaaaaatgttatagccatagtcacagcgaaacgttggctcaatataagcctctgtcacctgaccgaatagatcagcgagaatttgctggcgtaatgtgtgctcttccgccagggaatgattgtatcggtgaataagctgacgagcgcgcaggcgatcgcgagataacgtctcatctgcgctgcgatacaactcaccagcaatcatcttttctttttctgtgctcattactgacctccggttgctgaaaatgcggcaacacagtaagacgaaaagtcagtgaagagaacgttcccattacatctgtgtgataaagatcacatagggtatgtcttcatggcgaaaaagtataaaattcttaataaacagccggttatagctccgaaagcgaattatttattagcgaataaatttccatacactggaagggatcttgtcgtacagtttattcatggtcaattcggcgaggcggtgatctgcggcactgtaaaataccgccagttcattatcacttaattcgtatttatttttctcgataacacgctccagcgtgtcaattgtctggcaacgacgtaaacgcattaaataatcggttttcgttaaaggtttttcggacatacttctacctatggttgtaataattttaacaagataaactcgcaggattctctttcgtcgcattgacaaaacaacggaatagtcgattaccactcttccgccatttctgaagatcctgcatattaataccataactactgaacaacataaaggtgtcatccagatattcgtcgatctgctcaatgagcttattgtcttcattatacttaattttgtaattaagtgcgaaggtcgcaatatgctcaatcagttcattcaactggaggttgatcgcgctggttgggtcgtttacccagccatgattgctttcttcaaggtttgcaaggcagtcatgatacagggtttcacagagaaacttaagctgtgcgatatcatgtcttttgggactgtattcatccataacgcgtccccttcttagcggttgaactaacggacacctttcgggatggaaaaaacttactgacctggacttgccctctcgtttgttagcttaactataagccactctttgcaggttttcatcgcattattacgaaaaattacaattaggaaggaagcgggacaggactcactttttcatactagcactaacccgcagcaggtaaaagcagtttgctcgaactattcataacatttcaggattatcgccagatgaaattggtgacactaataccaggattgctctgaatatgacgtaataaccgaggaatgaataaagaattaccgcaaataattaagaatagcctctaaatgattatggattattaaatctattagcgctacttaatataaattaactaacaatcagtattttttatgaattttatccgtggttaatactggttttcgtatgagatcctgagttggtggttcaattactccttaatgttcgtaggttatgcataaaaaaggccgcttacgcggccttagtgattacacgttgtatcaatgatgatcgacagtatggctgtgctcgatatcttcattcttgcggctaaagcggcggcgaaccaccacaaagaataccggaacgaagaagattgccagtaccgttgcggtcaccatcccgcccattacaccggtacctactgcgttctgcgcgccggaaccagcaccagtactgataaccagcggcataacgccgaggataaacgccaggctggtcatcaggatcggacgtaaacgcatccgcaccgcatcaagcgtcgcttcaatcagacctttaccttctttatccatcaagtctttggcgaattcgacgataaggatcgcgttcttcgcgctcaacccaatggttgtgagcaggcctacctggaagtaaacgtcattggtcaggccacggaaggtggcagccagcaacgcaccgataacccccagcggaacgaccagcataacggagaacggaatgctccagctctcgtacagcgccgccagacacaggaacacgacaatcaagctaatcgcgtacagactaggtgcctggttgccggagagacgttcctgataggacatccccgtccagtcatagccaacaccggtaggcagtttgctcgccagttgttccatcagctccattgcttcaccggtacttttacccggtgccgcctggcctaagatttccatggatggcaggccgttgtaacgttccagacgcgggctaccgtactcccaacgagaagaggagaacgcgctgaatggcaccatctgaccatcagcagcacgaacataccagtcgccgatatcatccggcagcatacggtatttcgcttcactcatgacataaactttcttcacacgaccgcggtcgataaagtcgttcacatagctgccgccccatgcagcgcccagagtggtgttaatgtcgttgatagaaacacccagcgcctgcgctttttcctggtcgatatcaatcttaaactgcggggtatcttccagaccgtttggacgtacgctggtcaacatatcagggtgcttcgctgcttctgcaagcaactggttacgcgcctgagtcagtttttcgtgaccaaggccagcctggtcaatcagctcaaagtcaaagccggttgcagtacccagttccacgattgcgggcaggttaaaggcgaaaaccatcgcatctttgatttggctgaaagcgcgtgttgcacgcatggtaatcgcttcaactttgttttcttcgcccggacgatcggcccagtccttcaaggaaacgaacgcaataccggtattctgaccacgtcccgcaaagccgaagccgttaacggcgaacacgctctcaacgttgttcttttctttggtcagatagtaatgcgttacctcattgagcactttctgtgtacgttcctgcgttgcacctgctggcagctgaaccatggtcataaacacgccctggtcctcatctggcaagaaggagcttggcagacgcacgaacagataggccatgccgaccacgatgatcagatacagcaccaggtaacgccccgtactgcgcagaataccgcctacgctgtcggtgtagtggtgcgtgctcttctcgaacatgcggttaaaccagccgaagaagccttttttaccttccccgtgatcgcctttggcaatcggtttcagcatggtggcacaaagagctggagtcaggatcaacgccaccagtacgctcagcgccattgcactaacaatggtaatagagaactgacgatagatagcaccagtagaaccgccaaagaaggccatcggtacgaataccgcgctcagtaccatcgcgataccgaccagagcgccctgaatctgccccatgctcttacgggtagcttcttttggcggcaaaccttcttccgccataacacgctcaacgttttctaccacaacgatggcgtcatccaccaacaggccgatggcgagcaccatcccgaacattgttagcgtgtttatgctgaagccaaaggcggcaaggacggcaaaggtcccgagcaataccaccggtacggcaatggtcggaatcaacgtcgcgcggaagttctgcaggaacagatacataaccaggaacacgaggatgatcgcttcgaccagcgttttaaccacttcgtgaatagagattttcacgaacggcgtggtgtcgtatgggtaaacaattttcagaccgctcgggaagaacggttccatcttcgccagttcagcacggattgccgcagcggtatccagcgcgtttgcaccggtcgccagcttgatccccagaccggaagccggttggccgttaaactctgcgatgatgtcgtagttctcaccacccagctcaatcttcgcgacgtcacgcagcagcacgcgggaaccatcctgattcactttcagcaggattttgccgaactcttcagtagaggtcagacgcgtctgagcaataatagaggcgttaagctgttggcctttcaccggcggcgtaccaccgagctgacccgccgcaacctgggcgttctgcgctttgatggcggtaatgacatcaaccggcgttagctggaatttgttcagctcattcgggttcatccagatacgcatcgcgtactgactaccgaacaactgaacatcacccacgccgctcgtacggctgatggcatctttcatattcgccgccacgtagtcggagatatcctcctgcgtcatggtgccatcggtgttgataacgccgacaaccatcaggaagctgctggaacttttctcaacgctcaccccttgctgctgaacttcttgcggcagcaacggcatcgccagctgcagtttgttctgcacctgaacctgcgcgatatccgcatcagtaccagactcaaaggtcagggtgatctgcacggtacccgtggagtcactgttagaggacatgtacatcaggttatcgataccgttcatattctgttcgataacctgtgtcaccgtgtcctgcactgttttcgcatcagcgccggggtaggaggcggagatcgttactgccggcggtgcaatcgtaggatgttgcgccaccggcagtttgaggatcgccagcccccctgccaacatgatgataatggcgatcacccacgcaaaaatcgggcgatcgataaagaaattaggcatgtcttaacggctcctgtttaagttaagacttggactgttcaggctgagcaccgcttgcggcttgctggttattatcagcggtaacttcttgtgcttttacctggacaccaggacgcactttctgcagcccacttattactacgcgatcgcctgctttcagaccttctgtcaccagccacttatcgccaatagcctggcttgcaacgatcggacgggtttccactttgtcatccgcgccaactaccagtacggtggcatcgccacgcggcgtacgggttacgccctgttgcgggactaaaatagcgtttggattaagcccttcttccagacgtgcgcgcacgaacatacccggcagcagagtgtgatccgggttcgggaagatagcgcgtagggtgatagacccagtggtctgatcaacggtaacgtcagagaattccagcgtaccgtcctgcgggaacttaatgccgtcactggtgatcagactcactttggctttgccgttctcttgtttcagcgtgccattcgccagttcctgtttcaggcgcaggaagtcgttgctggactgggtcacatcaacgtagatcggatcaagttgctgcacggttgccagcgcagtcgcctgaccgttctgtaccaatgcgccttccgtcacgttgctcttaccaatgcgaccgctaatcggagaggtgactttggtgtaagccagattgatccgcgcagtttcaacggcagctttcgccgcagttaccgcagcattcgcctgttgcgcatcagccagagcctgatcgtactcttgcttactgatgtactgagtaccgagcagtttctgataacgattcaccgtcaattgcgcgatattggctgcagcctgggctttcgccagatcacctttcgcactgtcgtatgtcgcctgataggtcgcaggatcaatctgatagagagagacacctgcttcgatgtcgctaccttctttgaaattacgcttcaggataatcccgctaacttgaggacgaacttctgcgatccggtaggcactggtgcgacccggaagctcggttgtgatctgcagaggttcagttttgactgttactacgccaacggcgggcatctgctggccaccttgttgggcctgtttgtcgtcacatcctgttagggctaagctgccactgagcatcagaacgaccgccagaggcgtaaaccctctgtttttgttcatatgtaaacctcgagtgtccgatttcaaattggtcaatggtcaaaagttaataaacccattgctgcgtttatattatcgtcgtgctatggtacatacattcacaaatgtatgtaaatctaacgcctgtaaattcacgaacatatggcacgaaaaaccaaacaagaagcgcaagaaacgcgccaacacatcctcgatgtggctctacgtcttttcagtcagcagggggtaagttccaccagcctgggcgagattgcaaaagcagctggcgttacgcgcggtgcaatctactggcattttaaagacaagagcgatttgttcagtgagatctgggaactgagtgaatccaatattggtgaactagagcttgagtatcaggcaaaattccctggcgatccactcagtgtattaagagagatattaattcatgttcttgaatccacggtgacagaagaacggcgtcgattattgatggagattatattccacaaatgcgaatttgtcggagaaatggctgttgtgcaacaggcacaacgtaatctctgtctggaaagttatgaccgtatagaacaaacgttaaaacattgtattgaagcgaaaatgttgcctgcggatttaatgacgcgtcgcgcagcaattattatgcgcggctatatttccggcctgatggaaaactggctctttgccccgcaatcttttgatcttaaaaaagaagcccgcgattacgttgccatcttactggagatgtatctcctgtgccccacgcttcgtaatcctgccactaacgaataaccctgaatctgactccaggatttttcctggacattttcgtcgttgctattctggttcactgcgtcgtgatattcttgcggtttgactttttcaggtcgttcttcaggttcagaaaccttcattcatcatgactatgttccagtattacaaacgaagtcggcattttgtttttagtgcatttattgcttttgtttttgtcttgttatgccagaacacggcgtttgcgcgggcgagtagcaatggtgatctgccgacaaaagcggacctgcaggcgcaacttgacagtctaaataaacaaaaagatctttctgctcaggacaaactggtgcagcaggatctgacagatacattagccaccctcgataaaatcgatcgcataaaagaagagacagttcagctacggcaaaaagtcgctgaagcgccggaaaaaatgcgccaggcgaccgcggcgttaacagcacttagcgatgtcgataacgacgaagaaacgcgcaaaattctgagcacgctgagcttgcgccagctggaaactcgcgttgcccaggcgctggacgatttgcaaaacgcacaaaacgatctggcgtcttataacagccagctggttagcttacagacgcagcccgaacgcgtgcaaaatgcgatgtataacgctagccagcagctgcaacaaattcgcagtcgtctggatgggactgatgtcggcgagacagccttacgtcccagccagaaagtgttaatgcaggcccagcaggcgttgctgaatgcggagattgaccagcagcgtaaaagcctggaagggaacaccgtcttgcaggataccttgcaaaagcaacgtgattacgtgacggcgaacagcgctcgtctggagcaccagttacaactgttgcaagaagcggtaaacagcaagcgcctgactttaaccgaaaaaacggcgcaggaagccgtctccccggatgaagccgcgcgtattcaggctaatccgctggtgaagcaggaactggaaattaaccagcagttaagtcagcgtctgattaccgcgactgaaaacggtaatcagttgatgcagcaaaacattaaagtcaaaaactggctggagcgggcgctgcaaagcgaacgcaatattaaagagcagattgccgtcctgaagggcagcctgctgttgtctcgtatcctttaccagcaacaacaaacgctgcccagcgcggatgaactggaaaacatgaccaaccgcatcgcggatttgcgtctcgaacagtttgaagttaaccagcagcgtgatgcactcttccagagcgatgcgttcgtcaacaaactggaagaaggtcacaccaacgaagtcaacagcgaagttcacgatgcgttattgcaagtggttgatatgcgtcgcgaattgctggatcaactcaacaaacagttgggtaaccagctgatgatggccattaacctgcaaatcaaccagcagcagttaatgagtgtgagcaaaaacctgaaatccatcctgactcagcaaatcttttgggtgaacagtaaccgtccaatggactgggactggatcaaagcgttcccgcaaagcctgaaagatgaatttaagagcatgaaaatcacggtgaactggcaaaaagcctggcccgccgtttttatcgctttcctcgctggtttgccgctgctgttgattgccgggctgatccactggcgtctgggctggctgaaagcgtatcaacaaaaactggcttccgctgtgggttccctgcgtaacgacagccagctcaacacaccaaaagcgatccttatcgacctgatccgtgcgctgccggtgtgcctgattattctcgcggttggcctgattctgttgaccatgcagctcaacatcagcgaactgctatggagcttcagcaaaaaactggcgatattctggctggtgtttggcctgtgctggaaggtactggagaaaaacggcgttgccgtacgtcacttcggcatgccggaacagcagaccagccactggcgtcggcaaattgtccgcatcagtctcgcattgctgcctatccatttctggtctgtggtggcagaactttccccgctgcatctgatggatgatgtgctggggcaagcgatgattttcttcaacctgctgctgattgccttcctggtatggccgatgtgccgcgaaagctggcgtgataaagagagccacaccatgcgactggtcaccattaccgtgctgagcataatcccgattgcgctgatggtgctgactgctacaggctacttctacactacgctgcgtctggcaggacgctggattgaaaccgtttatctggtgatcatctggaacctgctgtaccagacggtactgcgtggcttaagcgtagcggcgcggcgtatcgcctggcgtcgtgcgctggcgcgtcggcagaatctggtgaaagagggcgcagaaggtgctgaaccgccggaagaacccaccattgcactggagcaagttaaccagcagacgctgcgtattaccatgttgctgatgtttgcgctgttcggtgtcatgttctgggcaatttggtccgatttgatcaccgtgttcagctatctcgacagcatcacgctctggcattacaacggcactgaagctggcgctgcggtggtgaaaaacgtcaccatgggcagtctgttgtttgcgattatcgccagtatggtggcctgggcgttgattcgcaacctgcctggtttactggaagtgctggtgctcagccgactgaatatgcgccagggcgcgagctatgccattactaccatccttaactacatcattattgctgttggtgcgatgacggtgttcggaagcctgggcgtctcttgggataaactccagtggctggccgcagcattatccgtaggtcttggttttggtttacaagaaattttcggtaacttcgtctccggtttgatcattctattcgaacgtccggtgcgtattggcgatacggtaaccattggtagcttcagcgggacggtaagtaagatccgtattcgtgcgacaacgattaccgatttcgatcgcaaagaagtgatcatcccgaacaaagcgtttgttaccgagcgtctgatcaactggagcttgactgacactactacgcgtctggtgatccgtctcggcgtggcctatggctccgatctggaaaaagtgcgtaaagtgttactgaaggcggcgactgagcacccaagggtgatgcacgaaccaatgccggaagtcttctttacggcatttggtgccagcacgttggatcatgagctgcgtctgtatgtgcgtgaactgcgtgaccgtagtcgtactgtcgatgagctgaaccgtactatcgatcagctgtgccgtgaaaacgacatcaacattgcctttaaccagcttgaagtgcatctgcacaacgagaagggcgatgaggtgacggaagtaaaacgcgactacaaaggcgatgacccgacgccagcggtagggtaaaaacgaaagggggcaacatttagttgccccgagattgctaacaaagtgcgcgttgttcatgccggatgcggcgtgaccgccttatccggcctacgaaaccgcaagaattcaatatattgcaggagcggtgtaggcctgataagcgtagcgcatcaggcagttttgcgtttgcccgcaaccttaggggacatttagcgaccccatttatttctcacttttccgcctcatcatcgcgcgttaatttcttttcataatcacgctttacaatatccagcgcgcgcagcacggtactggcagggatctgattttcctccagcagcacaatcaaatcgacagccagtttgacatcgtcaggggcattttccagactcatattctctccattgttagcgggttaaacgcgctaacctgttttcgattttttccagcgcatggcggcagcgtgccaggcgcgcttcataggcttccacttcacgatgcagcgtttgctgttccacgagatcggtcacccgcgccagacgggctctgcgttcggcaaccatctcacgtagccgccgctcaaaatcctgatgctgaatacgtttacgctgccagcgggcaattttcggtggtgcactgtcccactcgcgcaaactccaggcggaggcttcacgcgcgatggcttccagttgtgccgccagatgttccgccagccaggccacttgcggcagctgttgctgctcaactgcatgacgaagcgcagccagattatcgcccgcctcgtcgagacaagcctgtagtgttgtcgcacgagtctgaaaaagatgcctgtcgaaacgagcacttagcgtggcgaactgactcaccggggcacaacgctgacgcagcgtagcgagctgtccttccagtttttccagcagcagggcggttttcacgataagacctcaatgaaaatgataattgttatgctaaagtagccactctgtaagctgacaacactcaatatgcaacgaatcattttaatcatcattggctggctggcggtagtgctgggtacgctgggcgtggtattaccggtattaccgacgacgccgtttatcctgctggcggcctggtgctttgcccgttcttccccgcgctttcacgcctggttgctgtaccgcagttggtttggcagctatctacgtttctggcagaaacatcatgcgatgccgcgcggcgtcaaaccgcgggcgattttgcttattttgctcacgtttgccatttctctgtggttcgtccagatgccatgggtgcgcatcatgttgctggtaattctcgcctgtttgcttttctatatgtggcgaattccggtgattgatgaaaagcaagaaaagcactgaagcacaacaatcgcagttgcaattattgcgtacagccagtacattctggcgttttcgagcacaggcgcaggcggtcaaaggttaaacaactgttacttttgatacgtttaaaacgcgccgtgagtaccaccgtaacaagcaggcatacacttatgaccgcgactgcacagcagcttgagtatctcaaaaatagcatcaaaagcattcaggactacccaaaacccggcattcttttccgcgatgtcaccagcttactggaagacccgaaagcttacgctctcagcatcgacttgctggttgagcgttacaaaaatgcgggcattaccaaagttgtcggcaccgaagcgcgtggcttcttgtttggcgctccggtagctctgggtctgggcgttggctttgtaccggtccgtaaaccgggcaaactgccgcgtgaaaccatcagtgaaacttacgacctggaatacggcaccgatcagctggagatccacgttgatgccatcaaaccgggcgacaaagttctggtggtggacgacctgctggcaaccggcggcactatcgaagcgaccgttaaactgatccgtcgtctgggtggtgaagtggctgacgctgcgttcattatcaacctgttcgatctcggcggcgaacagcgtctcgaaaaacagggcattaccagctacagccttgtcccgttcccgggccattaattatcgccagtcttgtgctgcccacgctacggacagcacaagatgtgcattcagcctcgccgttctgacggggctgtgttagcattaccccttcgtgaatccaccttccagcgtttcagagcctgccaatgagttatcaggtcttagcccgaaaatggcgcccacaaacctttgctgacgtcgtcggccaggaacatgtgctgaccgcactggcgaacggcttgagcttggggcgtattcatcatgcttatcttttttccggcacccgtggcgtcggaaaaacctctatcgcccgactgctggcgaaggggctaaactgcgaaaccggcattaccgcgacgccgtgcggcgtgtgcgataactgtcgtgaaatcgagcaggggcgctttgtcgatctgattgaaatcgacgccgccagccgcaccaaagttgaagatacccgcgacctgctggataacgtccagtacgctccggcgcgtggtcgtttcaaagtttatctgatcgacgaagtgcatatgctgagccgccacagctttaacgcactgttaaaaacccttgaagagccgccggagcacgttaagtttctgctggcgacgaccgatccacagaaattgccggtgacgattttgagtcgctgtctgcaatttcatctcaaggcgctggatgtcgagcaaattcgccatcagcttgagcacatcctcaacgaagaacatatcgctcacgagccgcgggcgctgcaattgctggcacgcgccgctgaaggcagcctgcgagatgccttaagtctgaccgaccaggcgattgccagcggtgacggccaggttagtacccaggcggtcagtgcgatgctgggtacgcttgacgacgatcaggcgctgagcctggttgaagcgatggtcgaggccaacggcgagcgcgtaatggcgctgattaatgaagccgctgcccgtggtatcgagtgggaagcgttgctggtggaaatgctcggcctgttgcatcgtattgcgatggtacaacttagccctgctgcacttggcaacgacatggccgccatcgagctgcggatgcgtgaactggcgcgcaccataccgccgacggatattcagctttactatcagacgctgttgattggtcgcaaagaattaccgtatgcgccggaccgtcgcatgggcgttgagatgacgctgctgcgcgcgctggcattccatccgcgtatgccgctgcctgagccagaagtgccacgacagtcctttgcacccgtcgcgccaacggcagtaatgacgccaacccaggtgccgccgcaaccgcaaagtgcgccgcagcaggcaccgactgtaccgctcccggaaaccaccagccaggtgctggcggcgcgccagcagttgcagcgcgtgcagggagcaaccaaagcaaaaaagagtgaaccggcagccgctacccgcgcgcggccggtgaataacgctgcgctggaaagactggctagcgtcaccgatcgcgttcaggcgcgtccggtgccaagcgcgctggaaaaagcgccagccaaaaaagaagcgtatcgctggaaggcgaccactccggtgatgcagcaaaaagaagtggtcgccacgccgaaggcgctgaaaaaagcgctggaacatgaaaaaacgccggaactggcggcgaagctagcggcagaagccattgagcgcgacccgtgggcggcacaggtgagccaacttagcctaccaaaactggtcgaacaggtggcgttaaatgcctggaaagaggagagcgacaacgcagtatgtctgcatttgcgctcctctcagcggcatttgaacaaccgcggtgcacagcaaaaactggctgaagcgttgagcatgttaaaaggtagtacggttgaactgactatcgttgaagatgataatcccgcggtgcgtacgccgctggagtggcgtcaggcgatatacgaagaaaaacttgcgcaggcgcgcgagtccattattgcggataataatattcagaccctgcgtcggttcttcgatgcggagctggatgaagaaagtatccgccccatttgatcgtaagcacagcttacgttcgtcatccttaacgtgattgagagagaaacctatgtttggtaaaggcggtctgggtaacctgatgaagcaagcccagcagatgcaagaaaaaatgcagaaaatgcaggaagagatcgcgcagctggaagtcaccggcgaatctggcgcaggtctggtaaaagtgaccatcaacggtgcacacaactgccgtcgcgtagagatcgacccgagcctgctggaagacgacaaagagatgctggaagacctggtggctgcagcattcaacgacgcagcacgtcgtattgaagaaacgcagaaagaaaaaatggcctctgtatcctccggaatgcagctgccgcctggctttaagatgccgttctgatgcaaaccagcccgctgttaacacagcttatggaagcactgcgctgtctgccgggcgttggcccgaagagcgcgcagcgtatggcgttcacgctgcttcagcgcgatcgtagcggcgggatgcgtctggcgcaggcgctcacccgggcgatgagcgaaatcggccactgcgccgattgccgcactttcaccgaacaggaagtctgtaacatctgtagcaatccgcgtcgtcaggaaaacggtcaaatctgcgtggtggagagtccggcggacatctacgccattgagcagacggggcagtttagtggtcgttattttgtgttgatggggcatctgagtccgctggacggcatcggtccggatgatatcgggcttgatcgtctggaacagcgtctggcagaggaaaaaatcactgaagtgatcctcgccaccaaccccacggttgaaggtgaagctaccgctaactacattgccgagctttgcgcgcaatatgacgtggaagccagccgaatcgctcatggcgttccggttggcggcgagctggaaatggtcgacggcaccacgttgagtcactcccttgccgggcgtcataagattcgtttttaagcaaacgagagcaggatcacctgctctcgcttgaaattattctcccttgtccccatctctcccacatcctgtttttaaccttaaaatggcattattgaggtagacctacatgaaaggacaagaaactcgtggttttcagagtgaagtgaaacagcttctgcacctgatgatccattctctctattccaataaagaaatcttcctgcgtgagcttatctctaacgcctccgatgcggcggacaagctgcgtttccgtgcgctctctaacccggacctgtacgaaggtgatggcgaactacgcgttcgtgtctctttcgataaagacaagcgtacgctgaccatctccgataacggcgtggggatgacccgcgacgaagtgattgaccatctggggactatcgctaaatccggtaccaaaagtttcctcgaatccctgggttctgaccaggcgaaagacagccagctgatcggtcagtttggtgttggtttctactctgcgtttatcgtggccgacaaagtgaccgtgcgtactcgcgcggcaggcgaaaaaccagaaaatggcgtcttctgggaaagcgctggcgaaggtgaatacaccgttgccgacatcaccaaagaagatcgtggtactgaaatcaccctgcatctgcgtgaaggcgaagacgagttcctcgatgactggcgcgtgcgttccatcatcagcaaatactccgaccatatcgcgctgccggtagagatcgaaaaacgcgaagagaaagacggcgaaaccgttatctcctgggagaaaatcaacaaagcgcaggcgctgtggactcgtaacaagagcgaaatcaccgatgaagagtacaaagagttctacaaacacatcgcccacgactttaatgatccgctgacctggagccacaaccgtgttgaaggtaagcaggagtacaccagcctgctgtacatcccgtcccaggctccgtgggatatgtggaaccgcgatcataaacacggcctgaaactgtatgttcagcgtgtgttcatcatggacgacgcagaacagttcatgccgaactatctgcgcttcgtgcgtggtctgattgactccagcgatctgccgctgaacgtttcccgtgaaatcctccaggacagcacggtaacgcgtaacctgcgcaatgcgctgaccaagcgtgtgctgcaaatgctggaaaaactggcgaaagacgacgcggaaaaataccagaccttctggcaacagtttggcctggtactgaaagaaggtccggcggaagatttcgctaaccaggaagcgatcgccaaactgctgcgttttgcttctacccataccgattcttctgcgcagaccgtatctctggaagactacgtttcccgcatgaaagaagggcaggagaaaatctactacatcaccgcagacagctatgcggcagcgaagagcagcccgcacctggaactgctgcgtaagaaaggcatcgaagttctgctgctttccgaccgcatcgatgagtggatgatgaactatctgactgagttcgacggtaaaccgttccagagcgtgtctaaagttgacgagagccttgaaaaactggctgacgaagttgatgagagcgcgaaagaagcggagaaagcactgactccgttcatcgaccgtgtgaaagccctgctcggcgagcgcgtgaaagatgtccgtctgactcaccgtctgaccgatacgccagcgatcgttagcaccgacgcggacgaaatgagcactcagatggcgaaactgttcgctgcggcgggccagaaagtgccagaagtgaaatacatcttcgaactgaacccggatcacgtactggtgaaacgtgcggcagatactgaagatgaagcgaagttcagcgagtgggtagaactgctgctggatcaggcgctgctggcagaacgcggcacgctggaagatccgaacctgtttattcgtcgtatgaaccagctgctggtttcctgatgtaatgccggatgaccttcgtgtcatccggcatttttcttttcatcatctgcactttccgcaaattatctcgccattaaccgtttcagccccaggtgcctttcttgaggcaatcgcctgttggtggtatcgtttatcgctttttcaaaaaattcgacacattttaaggggattttcgcaatgcgtatcattctgcttggcgctccgggcgcggggaaagggactcaggctcagttcatcatggagaaatatggtattccgcaaatctccactggcgatatgctgcgtgctgcggtcaaatctggctccgagctgggtaaacaagcaaaagacattatggatgctggcaaactggtcaccgacgaactggtgatcgcgctggttaaagagcgcattgctcaggaagactgccgtaatggtttcctgttggacggcttcccgcgtaccattccgcaggcagacgcgatgaaagaagcgggcatcaatgttgattacgttctggaattcgacgtaccggacgaactgatcgttgaccgtatcgtcggtcgccgcgttcatgcgccgtctggtcgtgtttatcacgttaaattcaatccgccgaaagtagaaggcaaagacgacgttaccggtgaagaactgactacccgtaaagatgatcaggaagagaccgtacgtaaacgtctggttgaataccatcagatgacagcaccgctgatcggctactactccaaagaagcagaagcgggtaataccaaatacgcgaaagttgacggcaccaagccggttgctgaagttcgcgctgatctggaaaaaatcctcggctaattcgaaagcgcgcacggacagtcccctcgccccctcggggagagggttagggtgaggggaacaggcccgcacaagcaaacttatcagcaatctcaggccggatattcattcggccttttacaaaaacctcaatctgcgctattcctttttctgatttgacctctcacagcaattagttcttcttcctcacttttccgctacaattatcaacaagttgaatcgataagaggcggtaatgcgtcagactaaaaccggtatcctgctggcaaacctgggtacgcccgatgcccccacacctgaagcggtaaaacgctatctgaaacaatttttaagcgacagacgcgtggttgataccagtcggttgttatggtggccattgctgcgcggcgtgattttgccgctgcgcagcccgcgtgtggcgaagctgtatgcctctgtctggatggaaggtggcagcccgctgatggtttacagccgccagcaacagcaggcgctggcacaacgtttaccggagatgcccgtagcgctgggaatgagctacggcagcccaagtctggaaagcgccgtagatgaactcctggcagagcatgtagatcatattgtggtgctgccgctttatccgcaattctcctgttctacggtcggtgcggtatgggatgaactggcacgcattctggcgcgcaaacgtagcattccggggataagctttatacgtgattacgccgataaccacgattacattaatgcactggcgaacagcgtacgcgcttcttttgccaaacatggcgaaccggatctgctactgctctcttatcatggcattccccagcgttatgcagatgaaggcgatgattacccgcaacgttgccgcacaacgactcgtgaactggcttccgcattggggatggcaccggaaaaagtgatgatgacctttcagagccgctttggtcgggaaccctggctgatgccttataccgacgaaacgctgaaaatgctcggagaaaaaggcgtaggtcatattcaggtgatgtgcccgggctttgctgcggattgtctggagacgctggaagagattgccgagcaaaaccgtgaggtcttcctcggtgccggcgggaaaaaatatgaatatattccggcgcttaatgccacgccggaacatatcgaaatgatggctaatcttgttgccgcgtatcgttaaagctgagcggtaaagaactgagcgccgtcgcgaagagcctcgtcggcggttttcatcatccgactataatgcaaaaaggcgtgcagcgtgcctgggtagagtttgaactcacagggctgctgatgcgccgctaacgtctggtaaagcagacggctgtcatccagcagcggatcgaactccgccccggcaataaaacagggcggaacttcgcgagtgagatcattattaaacagacagtaatacgggctctcgcggtccgcgtcgttgcttaaatatgcctcttcgtacatctgcaaatcctgttgcgttaagccatcccagacaccgcccaacagacgacgagtcacggaatcccgtaatccgtaaagcccataccacagcaaaacgcccgcaactttaccgcaatcgatctgtttatcacgcaaccacaacgcactggcgagcgccagcatggcacctgcggaatcaccggcaaagccaatgcgggacatattgatttgataatcctccgcctgctggtggaaataacaacaagcagccacaatttcctctatcgcttgcggaaaacgcgcttcaggactaagggtgtaatcaataccaatcaccgtacattggctgtagcttgccagcaggcgcatgatgcgatcgtgggtatcgagattgccgagaataaaaccgcctccatgcaaataaaatagcgtcgctgggctatctggctgcggacaaaagagacgtgtttccacctgcccatattttgttggaaccatgtaagctctggttgccatttctggagcgcccgcattccagaatcggcgctcaagcgtgtaatactgtcgttgctcagcaatcgttcccgttgcgggccagggcggtaaatccggctgaagagtattcacaacggtcttcatttcagcagaaataaggtccagaacaggtagtttgttttccggcttcatacaaaaactcctttcaaattacgtcattgtaaggaaccactgccatgaaaatgcgatcccgcctgctgatattgaaactggctgcgtctcgcgcgctcccgtcagattgtgttaacattcgccgctcagttaaccacccgtaaaaacaaccatgaaatttcccggtaaacgtaaatccaaacattacttccccgtaaacgcacgcgatccgctgcttcagcaattccagccagaaaacgaaaccagcgctgcctgggtagtgggtatcgatcaaacgctggtcgatattgaagcgaaagtggatgatgaatttattgagcgttatggattaagcgccgggcatagtctggtgattgaggatgatgtagccgaagcgctttatcaggaactaaaacagaaaaacctgattacccatcagtttgcgggtggcaccattggtaacaccatgcacaactacagcgtgctcgcggacgaccgtagcgtgctgctgggcgtcatgtgcagcaatattgaaattggcagttatgcctatcgttacctgtgtaacacttccagccgtaccgatcttaactatctacaaggcgtggatggcccgattggtcgttgctttacgctgattggcgagtccggggaacgtacctttgctatcagtccaggccacatgaaccagctgcgggctgaaagcattccggaagatgtgattgccggagccagcgcactggttctcaccagttatctggtgcgttgcaagccgggtgaacccatgccggaagcaaccatgaaagccattgagtacgcgaagaaatataacgtaccggtggtgctgacgctgggcaccaagtttgtcattgccgagaatccgcagtggtggcagcaattcctcaaagatcacgtctctatccttgcgatgaacgaagatgaagccgaagcgttgaccggagaaagcgatccgttgttggcatctgacaaggcgctggactgggtagatctggtgctgtgcaccgccgggccaatcggcttgtatatggcgggctttaccgaagacgaagcgaaacgtaaaacccagcatccgctgctgccgggcgctatagcggaattcaaccagtatgagtttagccgcgccatgcgccacaaggattgccagaatccgctgcgtgtatatagccacattgcgccgtacatgggcgggccggaaaaaatcatgaacactaatggagcgggggatggcgcattggcagcgttgctgcatgacattaccgccaacagctaccatcgtagcaacgtaccaaactccagcaaacataaattcacctggttaacttatagtagcttagcgcaggtgtgtaaatatgctaaccgtgtgagctatcaggtactgaaccagcatagtcctcgtttaacgcgcggcttgccggagcgtgaagacagcctggaagagtcttactgggatcgttaagttatcgtcggttcgtaggccagataaggcgttcacgccgcatctggcatttggctctcgatgcctgatgcgacgctggcgcgtcttatcatgcctacatatttttcatattttacatccggcaaccaccgtttaccccgtcaccacctcacccgccggtggcgtttccagcagttccagcatggtacgggcgatttcacgctcgcccatcactacctgattcgcaccacgttcggtgatatacgccacttcatcgtcataatgggcgcgggcaataatctcaatatccggatttttcgcgcgggcagatgccacaatctcacccgcttcataaccgttgggaatcgtcaggatcagccattttgcacattccagatgcgccagttgcataatttcttcgttcgccgcattgcccaatactgcgcggaccccgcgctctcgcagctcatcaacacgggttcgactcgtctcaatcaccaccagcggaatatcagaggcgagcaatttctcccccagcaggctgcctacacgaccgtaacccaccagtagcgcatggttgcaaatatccactgggatctgcttctcttcttcgattgcctcttccagcgtctgctcttccagcgtttcggtcttcgccagatatttctccagtagtgcgaacagtaccgggttgagcataatgctcaggatcgcccctgccagtaccaggttttgtccggcctgcggcagtaaattcaatgccattcccagtcccgccaggataaacgcgaactcaccaatctgcgccaggctggcggcgatggttaatgccgtacgttgggagtgaccaaacagtcgcaccaggaaaaatgcggctaagctcttaccaaacagaataatcgccagcgtcgccagcactgccagcggttgctgaatcagaattaacggatcaaacaacatcccgacggagacaaaaaacagcaccgcaaacgcgtcgcgcaatggcagcgtatcgtgggcggcacggtgactcagttcagactcgttcagtaccatcccggcaaagaacgcaccgagtgcaaaggagacatcaaacagctctaccgcaccaaaggcaacccctaacgccagcgccagcacgctcagggtaaacagctcgcgagaaccggttgccgcgctgcgtgccataatccacggcaccagacggcgacctaccagcatcataatggcgataaatgcgatcactttgccgatggtgatccccatatcgactgcaagagtggcaaagcccacatcgccctgttccatcattcctgccactgcgggcagcaacaccagcgtcagaaccattaccaggtcttccacaatcaaccaaccgatggcgatttgcccacgctgactgtcaattaattgccgttcttcaagtgcgcgcagtaacaccacggtactggcggtggaaagacataaaccgaacacgataccggtcattaagctccagcccagcacggcagagagcgccatacccagcagcgtcgccacggctatctgggcgatcgcaccgggaatggcgatggcctttaccgccatcaaatccttcaggctaaagtgcaaaccgacgccaaacatcaacagaatgacgcccagttcagccagttccggggcaagcttggtatcggcaacaaagcccggagtgaatggtcctgccagcacacccgctaacagatatcccaccagaggagaaatacgtagtttattggccagcatgccgaggataaaggcgagcacaaggccgccaacaatggtggtgataagcggggtggcgtgatgcattccgtctccttttcctggtggttattgtccatttttggccgggaaaaccaaaattacaggtaatagtttatgacaatttcattgatgatgttcatgaataattattgaattttgcagaaaaatggaattagctgcaaaaaaagcacggatcggaaaacagaaggcggtttaacagaggaaaggcttatggcgactgtaaaacgatgcagccaaagtttgcctttggctgcaatgaaatcagtctttatgccggttatcaggcaggaatatggtcaacatccccaatagtggcaggaaagcacagattttatagactaactcgatgctggtgtgatcggcgataagccccagaactgccgctcccagacctcccatgccaaaagcaaaaccgaaaaagagtccagaaaccataccgatacgtcctggaagcagctcctgagcgtagaccagaatggcagagaatgcgctagcgaggataaatccaataatcaccgttaaaacccccgtccagtgcaggctggcgtagggtaaaatcagcgtaaacggcgcaacgccgaggatagagccccaaatcacatatttccgcccaattttatcccctacaggcccgccgatcaccgtacctgccgcaacggcaaacaggaaggcaaacagatgaagctgagcattctggatagataatccgaatttttgcatcagataaaaggtgtaatagctgctgatgctcgccatatagaaatatttgctgaaaatgaggattaacagaatgctgaccgccagtacaactttattgcgcggcagtggattgataatcgtcgctttgggttttcctttattcattcggtgctgtgcgctgtaccaacggctgatttgcgccaacaccacgatcgccagcagtgccgcaagcacaaaccaggcaacgttgcctttgccataaggcgcgataatcaccgccgccagcaagggtcccagggaactgccaaagttgccgccgacctgaaagatagattgcgccaggccatgccgcccgccggaagccatacgggccacgcgagaagattccggatgaaagacgctactaccggtaccgaccagcgccgccgccagcagaactgcgccaaaactgcccgccagcgcaagcagcaccagaccgcttaaggtaaagcacatgccaattggcaagctccatggcatcggatatttatcggtccagtagccgaccactggttgcagtaggctagaggcgagctggaaggtgagggttatcatgccaatctgcataaatgtcagagaaaattcactctgaagcagcggataaatcgccagaatcaggctttggatcatgtcgttcagcagatgactgaggctgatagcacctaaaataccaaagcttgttcgggccttggtcgtactcgcagccgcgcccgccacaggctggggttgttcactcattgccataggaaagtcactttttcagggttgcgatgtaaagaatgatcttatttgtgattattaccagactaacatacctgtatgcgtcgtctgaaggaagtctcaacgccgaatacagaatttctaatctggatgcagatttatcttcaccggacgcagacttgtctatgatgtcgcgtcatactatttttcaacacgttgaaatcaggtcagggagagaagtatgaaattattgcagcggggcgtggcgttagcgctgttaaccacatttacactggcgagtgaaactgctctggcgtatgagcaggataaaacctacaaaattacagttctgcataccaatgatcatcatgggcatttttggcgcaatgaatatggcgaatatggtctggcggcgcaaaaaacgctggtggatggtatccgcaaagaggttgcggctgaaggcggtagcgtgctgctactttccggtggcgacattaacactggcgtgcccgagtctgacttacaggatgccgaacctgattttcgcggtatgaatctggtgggctatgacgcgatggcgatcggtaatcatgaatttgataatccgctcaccgtattacgccagcaggaaaagtgggccaagttcccgttgctttccgcgaatatctaccagaaaagtactggcgagcgcctgtttaaaccgtgggcgctgtttaagcgtcaggatctgaaaattgccgttattgggctgacaaccgatgacacagcaaaaattggtaacccggaatacttcactgatatcgaatttcgtaagcccgccgatgaagcgaagctggtgattcaggagctgcaacagacagaaaagccagacattattatcgcggcgacccatatggggcattacgataatggtgagcacggctctaacgcaccgggcgatgtggagatggcacgcgcgctgcctgccggaagcctggcgatgatcgtcggtggtcacagccaagatccggtctgcatggcggcagaaaacaaaaaacaggtcgattacgtgccgggtacgccatgcaaaccagatcaacaaaacggcatctggattgtgcaggcgcatgagtggggcaaatacgtgggacgggctgattttgagtttcgtaatggcgaaatgaaaatggttaactaccagctgattccggtgaacctgaagaagaaagtgacctgggaagacgggaaaagcgagcgcgtgctttacactcctgaaatcgctgaaaaccagcaaatgatcagcctgttaagtccgttccagaacaaaggcaaagcgcagctggaagtgaaaataggcgaaaccaatggtcgtctggaaggcgatcgtgacaaagtgcgttttgtacagaccaatatggggcggttgattctggcagcccaaatggatcgcactggtgccgactttgcggtgatgagcggaggcggaattcgtgattctatcgaagcaggcgatatcagctataaaaacgtgctgaaagtgcagccattcggcaatgtggtggtgtatgccgacatgaccggtaaagaggtgattgattacctgaccgccgtcgcgcagatgaagccagatagtggtgcctacccgcaatttgccaacgttagctttgtggcgaaagacggcaaactgaacgaccttaaaatcaaaggcgaaccggtcgatccggcgaaaacttaccgtatggcgacattaaacttcaatgccaccggcggtgatggatatccgcgccttgataacaaaccgggctatgtgaataccggctttattgatgccgaagtgctgaaagcgtatatccagaaaagcagcccgctggatgtgagtgtttatgaaccgaaaggtgaggtgagctggcagtaatccgaaagtgccggatgtttgcatccggcacaatgcttaatcgcggcgggcgatatcagcaaatttggcatcgaggatctttgccagatcgcctgccgccagttcgatatccagtccgcgcttgccgccggaaacataaatagtggcaaattcttgtgcgggggcgtcgataatcgttggcagacgttttttctgccccagtgggctaatccccccaaccaggtatcccgtgctacgctgcgcgaccatcggatcggccatctcaactttcttggcacccagcgcttttgctacttttttaagatccagttgacctgcgaccggcgtaacggccacggcaaggtgtttcatatcaccgttcactgccaccagcagcgttttgtagacctgatccggattcaaacctaattttttgacgacttcatcgccaaaattggtttcagccggatcgtgctcgtaggtatggatttgaaagctaatcttgttttttcgagtaatttaactgcgggtgtcatggtaattttcctgccttaaacaaaaaaacgaagcaagcatacgcctgatggcggtccaaaaaaaagagtcatcttgcctaagagtattggcaggatggtgagattgagcgacaatcgagttacaccgtcgcttaaagtgacggcataataataaaaaaatgaaattcctctttgacgggccaatagcgatattggccatttttttagcgcaacatttgcggcaaattcccttctccatacaggtgtagtgcaccgaccgcgaccacatatcgccccggcggcatggcgcgtaatttatcccgccaggcgagatttcgctgatgcatcagcacatcgtacaggctctgactgaacgtattgggcagcgttatatcattattttgcggcggtgcattcagccaccagctcatcatttgttgcagcaaccgtgcgttggtatgccagtgggtcagcgtatcgtccagcagcgccagtcctttgtcagggagctggagcaacatggcaatctggttttcagccccttccagttcaatcacgggtttatgttgttgcttcgccgcctgcaatagctggtaatcgataccgtattctgcccgcagccccagtttttgtgcctgcgtcgcctgaagaaccatcgcgatttgccacagcggttgggtagaaaagagactgggagaaatgcccatctcctggctaatgtgctgcaggttttggagttgctcctcgctaatgcgctcttccagcgcctcgcaggcaggcaaattagcaaaaggcgtatcgctggtggaaacatccgcctcgacgatcagcgcatcggcgtttttgagctttttgagcaaacgggtgggcaggggagccatatcgtggctacccatatgaatactgccaatcagatgaaaatggcgattgccggggagggtgatatcgatggcaggccaggtgtaatgattaccgcgcagcgcggcccaaagcgtttttacccggtacaacagatccatacgacctccctttgtgaaatatcatgctagcgcgcggtgagggatggcgcaaatggagttggagacttgtttaatgtgtttgtatgattcagtatgttcttgcatcgctattcacaaggaagcaacagttaaaaaccatgaaacaggcaacaagaaaaccgacgacacccggagatattcttctctatgaatatctggaaccgctcgatttgaaaatcaatgagttagcagagttgctgcatgttcatcgtaatagcgtcagtgcactgatcaataacaatcgtaaactcactactgagatggcatttcgtctggcgaaagtttttgataccacagtcgatttttggctaaacctccaggcggcggttgatctttgggaagttgaaaacaacatgcgcacccaggaagaattgggacggattgaaacagtggctgaatatttggcacgccgtgaagagcgtgcaaaaaaggtcgcgtaaggccaaaacatcgcttcatctcgtaggccggataaggcgttcacgccgcatccggcatccgagcaccattgcctgatgcgacgcttacccgtcttatcaggcctacaaacttgtgcctgaaccgtaggccggataaggcgtttacgccgcatccggcatccgagcaccattgcctgatgcgacgcttacgcgtcttatcaggcctacaaacctgtgcctgaaccgtaggccggataaggcgtttacgccgcatccggcagtcatgcgtcgatgccaaatgcgccaccctaaagcagcgcatccgcaatgatgtacttattccttcggtttaaaccgcagcaaccggttggcgttactcactacggtaatgctgctgagcgccattgccgctccggcaactaccgggttaagcagtgttccagtgaacggccacaaaataccggcggcgaccggaataccgatactgttgtagataaacgcaccgagcaggttctgcttcatgttgtgcagcgttgcgcgggaaatagcgagcgcatccgcaacgcccatcaggctatggcgcatcagggtaatcgccgcggtttcaatggcaacatcactgccgccacccatcgcaatgccgacatccgcctgagccagcgctggcgcgtcgttaatgccgtcgcccaccattgccacctaacgtccttcactttgcagatgtttgatcgcttcggctttaccgtccggcagcaccccggcgatcacctcatcaatccctgcttctttggcgatcgcattggcggtggttgggttatccccggtcaacatcaccagacgatatcccgctttatgcaggcgttgcagcgccgccacgctatcactacgcaacggatcgcgtactgccagcagggctaccgctttcccgtcaaccgccagcagcacaggcgttgccccttggcttgcctgagcagtaatctccgcttcgatagctttggtaccaacctgttgctcatttaacagcgcctgattgcccagcaataacgcatgaccttcagcttcaccgctcacgcccagcccgcgcaatgtgcggaaaccgttgacctgcggtagctgcatatcacctgctttatcgaggatcgctcgtgccagcggatggctggaaccttgctccagtgccgccgccagacgcaatgcctgcgcttcatcaacatcagcaaatgttttcactgcgacaacctgcggcttcccttcagtcagcgtcccggttttatcgaacactacagtgtcgagtgtactggcgcgttgcagcgcgtcagcgtcccgcaccagcacgccaaactcagccgcccgcccgacgccggaaataatgctcatcggcgtcgccagccccagcgcacacggacaggcaataatcagtaccgtggtggcaatcaccagggtatagacaatctgcggtgccggaccaaagaaataccagattgccgcactgacaagcgcaataaccaccactaccggcacaaatacggcactgattttatccgccagctgaccgatttctggcttgctgctctgggcctggcgcaccatgcgaatgattcgactcagcgtagtatggctgccaaccgcactggcacgaaacagcacactgccgtcctgtaccactgtcccggcatggacgctatcgccttcgcctttttgctgcgggattggttcgcccgtcagcatcgcttcatccagccatgcttcgccctgggtaatctcgccatctaccggcacgcgatcgccggtcgtcaggcgcagcaacatacctggctgcacttctgccagaggcacgcttttttcaccttcgtcagtaaccaggcgtgccgtcggcggggttaaatcgagtaacttttccagcgccttagaagaacgctggcgtgcgcgcgcttccagcatatggccgagattgatcagaccgataatcatcgcgctggcttcgtaataaagatgtcgcgcttccatcgggaaccactgcggccacaggttgacgctcatgctatagagccacgccacgccagtacccagcgccaccagcgtatccatcgtcgccgcaccgttcagcaggcttttccatgcactgcggtaaaaatggccgccggcgaaaaccatcactgccagggttatcaggccgataaccaaccacaggctgcggttgtcagcggtgaccatcatgttatcgccgatcatcccccagaccatcaccgggatacccaccgccagtgcgacaattgcctgccagcggaagcgcttcatcgtagcgacggcggtttcttgctggcgctcgcggcgtttagcgtcatcttcaatcgcttccgcgccgtagcccgctttttccaccgcctgcactaaatcttgtggggaggcactgcccatcaccagcgcagtacgctccgccaggtttacccgtgcctgagtgacgcccggtacgctttgcagcgcattttgtacgcgggtgacacagctggcgcagctcatgccgctcagcagcaactgctggctgtcatcgtcatcggcggtcgctgccggaagcgcctcagaaaccgctgtcagtgcttcgctcgggatactactctccgccagcggtttagcctttgggtggcttacagatgcgtcataacccgcttgtttgatggtttcgatcagctgttctgcactggcagtcccggtaacgtgcgcttcagtgatagacacatccgcctgctcaacatccggacgctgttcaagactttctttcacgcgtttaacgcagtgaccgcaggacaggccgtccagggtcaggtcgatagtttgactcataaaacactcctttaagacagttttgactggctgtgataaaggttaaaccttccagcaaggggaaggtcaagaaattaataaaccaggcgggtaaaagtccgtaaagattaaaaaatcggctcgatttgcatcaggattagacatttatctctttgttttcctgtagttaagttgcgggtgctaagttaaatcaggatgcctgaaaatcggcaccggggtgaggaattacctcccgcatctataaaaaggagttaacaaaagatgttagatgcaaacaaattacagcaggcagtggatcaggcttacacccaatttcacagtcttaacggcggacaaaatgccgattacattccctttctggcgaatgtaccaggtcaactggcggcagtggctatcgtgacctgcgatggcaacgtctatagtgcgggtgacagtgattaccgctttgcactggaatccatcagcaaagtctgtacgttagcccttgcgttagaagatgtcggcccgcaggcggtacaggacaaaattggcgctgacccgaccggattgccctttaacagtgttatcgccttagagttgcatggcggcaaaccgcttagcccactggtaaatgctggcgctattgccaccaccagcctgattaacgctgaaaatgttgaacaacgctggcagcgaattttacatatccaacagcaactggctggcgagcaggtagcgctctctgacgaagtcaaccagagcgaacaaacaaccaacttccataaccgggccatagcctggctgctgtactccgccggatatctctattgtgatgcaatggaagcctgtgacgtgtatacccgtcagtgctccacgctcctcaatactattgaactggcaacgcttggcgcgacgctggcggcaggtggtgtgaatccgttgacgcataaacgcgttcttcaggccgacaacgtgccgtacattctggccgaaatgatgatggaagggctgtatggtcgctccggtgactgggcgtatcgtgttggtttaccgggcaaaagcggtgtaggtggcggtattctggcggtcgtccctggagtgatgggaattgccgcgttcagtccaccgctggacgaagatggcaacagtgttcgcggtcaaaaaatggtggcaagcgtcgctaagcaactcggctataacgtgtttaagggctgatcatgatgaacacggaaggtaataacggtaacaaacctctcggtctatggaacgtcgtttccatcggcattggggcaatggtgggggcggggatcttcgcgctgctggggcaggctgcattgctaatggaagccagcacctgggtcgcctttgcttttggcggtattgtggcgatgttttccggttatgcctatgcgcgtctgggggcgagctatcccagcaatggcggcattatcgacttctttcgtcgcggattaggcaacggcgtctttagcctggcgctcagcttactgtacctgttgacgctggcggtgagcatcgccatggtcgcccgtgcttttggcgcttatgccgtgcagtttttgcatgaaggcagccaggaggagcaccttattttgctctacgcgttggggatcattgcggtgatgacgcttttcaactccttaagcaaccatgcggtagggcggctggaagtgatcctcgtcggcattaaaatgatgatcctgttattgctgattattgccggtgtctggagcctgcaaccggcgcatatttccgtctctgcgccccccagctccggtgcgttcttctcctgtattgggataactttccttgcctatgcgggctttggcatgatggcgaacgcggcggataaagtgaaagatccgcaggtcattatgccacgggcgtttctggtggcgattggcgttaccacgttgctttatatcagcctggcactggttttgcttagcgatgtaagcgcattagagttagaaaaatatgccgataccgccgtagcgcaggctgcttctccgctgctcgggcatgtgggttatgtgatcgtcgtcatcggcgctttactggcgacggctagtgccattaacgcgaacctgttcgccgtgtttaacatcatggacaacatgggcagcgaacgcgaactgccgaagctaatgaataaatccctgtggcggcagagtacctggggcaacattattgtcgtggtgttgattatgctgatgacggcggcactgaatttaggcagtctcgccagcgttgccagcgccacctttttgatttgctacctggcggtgtttgtggtggcgatccgcctgcgtcatgatattcacgccagcttgccgattcttatcgttggtacgttggtgatgttgttggtgatcgttggctttatctacagtctgtggtcccagggtagccgtgcgttgatatggattattggcagtctcttactcagccttattgtggcaatggtcatgaagcgcaataaaaccgtataacatctctctgtgcgcagtacttcctgtattattgtggtggcggtcgatattcgcactggcaaaaaaacgtgcttgaatatctgttgaaaccctttaacaaagcacaggaggcgttgcgcgaacgatgaacatcagcgatgtagcaaaaattaccggcctgaccagcaaagccattcgcttctatgaagagaaggggctggtgacgccgccgatgcgcagcgaaaacggttatcgcacctacacgcagcagcatctcaacgaactgaccttactgcgccaggcacggcaggtgggctttaacctggaagagagcggcgagctggtgaatctgtttaacgacccgcagcggcacagcgccgacgtcaaacggcgcacgctggagaaggtggcggagaacgaacgacacattgaggagctgcaatccatgcgcgaccagctgctggcactggcgaatgcctgccctggcgatgacagcgccgactgcccgattatcgaaaatctctccggctgctgtcatcatcgggcagggtgattaagagctgacggctcggatatgtagggttatcccttctatcgcaatgacttcaacatgcgtacctgcaccgagatcctcgctggcgctgacaggccaactactgtcaccgacgcgcatatgaccgcgcccgttgaccagcggagattccagcacaaaacgtcggccaatcagctgctgcccgcgctggtttaaatgactatcgctgtgcttttgttcgcgcacccgccggctcaaccatttccaccacagccaggcggcgagcagcgtcaggatggcaaacattaccccttgccactcccaacccagcggcaccagccagaccaccaggccggtaatcaccgctgccacgccgctccacaacaaataaccatttccgcccagcatctcggctgccagcagcaaaccgccgagactgagccagaaaatatgtggatgaacgaccattaactccatcatggctgagtccgtttgttggcgctgtctttcaccagctcggcaatcccggcaatgctccccatcaggctgctggcctctaatggcatcatcactactttgctgttactggaggaaccgatctgctgtaacgcttcggtgtatttctgcgctacgaagtagttcaccgcctgaatatcaccggaggcgatagcttcagacaccattttggtggcgcgggcttctgcttcggcggaacgttcacgcgcttcagcctgtaaaaacgcgctctgacgttcgccttccgctttcaggatttggctctgtttttcaccttcggctttgaggatttccgcctgacggatcccttccgcttcaagaatgtaagcgcgtttggtacgttccgctttcatctgcgcgttcatactagagataagctctgccggtgggcgcacgtcgcgaatttcaatacgggtgactttaatcccccacgggttggtggcttcatcgacaatacgcagcaggcgactgttgatgctgtcgcgctgagagagcatttcgtcaagttccatactacccagcacggtacggatgttagtcatggtcaggttgatgatcgccagctccagattgctgacttcataagccgcgcgcggcgcgtcaatcacctgaataaagcacacggcgtcgatggtaacgttggcgttatctttgctgataacttcctgggaagggatatcgagcacttgctccatcatattgatcttgcgaccaatgcgatccataaacggcaccaccagactgagccccggctgtaacgttttggtatagcgaccaaagcgttctactgtccactgatagccctgcggtacgattttgacacccgcgccgacaatgaccagcgcgacaaaaatgagaatcgggataaagataagcatcggaaaaacctcctgttgtaccgtccataatcagcaaaattgctgcttgattaaacaaattatacctgattactgaaagagagttcccccttattcctgcgaaggataaactgtttttagtaaaaatcagaaaaagggaacagcgatgcaggaaaatagtcctttgcttcagctacaaaacgtaggatatctggcgggtgatgcgaagattcttaataacatcaattttagcctgcgtgctggcgaatttaagttaattaccggtccttctggttgtggcaaaagtacgctgctaaaaatagttgctagtttgatcagcccaaccagcggaacgttactgtttgaaggtgaggatgtcagcacactaaagccagaaatctaccgccaacaagtctcttactgcgcccagacaccgacgctgtttggcgatacggtatacgataatctgatctttccctggcagatccgtaaccggcagcctgacccagccatttttctcgattttctcgaacgcttcgccttgccggacagcattttgacgaagaatatcgccgagctatctggtggtgaaaaacaacgcatcagtttgattcgtaacctgcaatttatgccgaaggttttattgctggatgaaataaccagtgcgctggatgaaagtaataaacataacgtcaatgagatgatccatcgttatgtgcgcgagcaaaatattgccgtgctgtgggtgacacacgataaagacgaaattaatcatgcggataaagtgattacactgcaaccgcatgccggagaaatgcaggaagcacgctatgaactcgcataactaaagaaatgcaggaagcacgctatgaacagccataatattactaacgaaagtttagcactggcattaatgctggtggtggtggcaatcttaattagccataaagaaaaactggcgctggagaaaaatattctctggagcgtcgggcgagcgataattcagctgattattgtcggctatgtgctgaagtatattttcagcgtggatgatgccagcctgacattattgatggtgttatttatctgctttaatgcggcgtggaacgcgcaaaaacgcagtaaatatattgctaaagcttttatcagtagctttattgccattacggtcggggcgggaattaccctggcggtgctgattctcagtgggagcattgaatttatcccgatgcaggtgatccctatcgccgggatgattgccggtaacgccatggtagcggtggggttgtgttacaacaatttagggcaacgggtcattagcgaacagcaacagattcaggagaaactgagtcttggtgcgacgccgaagcaggctagtgcgatattgattcgcgacagtattcgcgcggctttaattccgacggtcgatagtgcaaaaacggttggcttagtgagtttaccaggaatgatgtccgggctgatatttgccgggattgatccggtgaaggcgattaaatatcagattatggtgacctttatgctgctcagtaccgccagcttgagcaccattattgcctgctatttaacctatcgtaagttttataatagccgccaccagttggtggtgacgcaattgaagaagaaatgatgcgatgccggatgcgcagcatcgcatccggcgttgtggttcatgtgccgatcaacggaatatcaatacaacaatgcatacagctggcggcgatacttgctcgccagtgcatcacccgtacccagcgcagcgaggatctcctggaacgttttacgcgtctgaccgtctgcggcggtgagatctttacgcagatgcccgaacagcaactccagcgcctcttcattgcgcccaacctgatgcagttgcagcgccagttgcgtcgccagtgcggcatcttctggattctccgccacctgctgttgcaactgttgaatttccggcgtatcagccgcctgcttcagcagttcgatttgcgccaccagcccctggtagcgggtgtcctgatcctgcaacggaatggttttcagcaccgcttccgcatcttcagaacggttcagcgcaatcagcgtttctgccagcagcaggccgatctccccgttctgattgctcaactgccaggcgtctttcagcaatggcagggcatcggtgtaattgctttcctgcatcagttgcatcgcctgctgcgctttcagctcttcttcgcgcggcagcactttatccagcagggcgcggatcgcctcttccggttgcggcccctggaagccatctaccggttgcccgttctggaacagatacacggtcggaatcgcacgcagaccaaactgcgcggcaatcatctgctccgcgtcgcagtccagcttcgccagaataaattgcccgttgtactgcgccgcgaggctttccagaattggggttaactgcaaacagtgctggctacgttcagaccaaaaatagaacagcaccggagtggtcatgctctgttcaagaacctgttgcaggttagattcgttaatgttgacaatattttctacggacatggagtcgctctctgttgtcgatattttctttgacatgggggcttaagcgcgcgcttcaactcacccctgcaatattttgtccatcacgcgccccggcagcaggcgcttaagcaccattaccgcccaggtcaccagcgtcaccggatagcgcatcttcggcttctcgctaataaaagcatggcgtactttgtccaccaccgcttccggtcccaacgtaaagcgggcggcgatgccgggattttcgactggtttatcactttgcgtctggttgacgttgtcggtgaagcgagtacgaatgggaccgggttcgatcaggctgactttaattccgctgtggcgcagctccatgcgcagtgcatcactccacgcctccagcgcatatttactggccgcgtaagcgccacgacccggcgtggagattaatcccatcacgctacttgtcatcacaatacgcccttcaccgtgcggtaacatcgcgggtaacaggcgcatggtgagctggtgtgcgccgaaaaagttggcggaaaactgctgttccatctgcgcacggctgatggtggaaagggggccatacatgccgaatccggcattgttaaagatcccatacagacaattatcggtcagggcgatcacctcgtcggctgcgcgatcaacactttctggactatccagatcgatcaacacgccggtaaatcccatgctgttcatgcgctcaacatcatccggtttccggcaacctgccagcacatgaaaaccctggcgttttaattcgagcgcgctttccaggccaattccactggaacatccggtaattaagacgcttttttgcataactttacctgtcaggatctccgttgctttatgagtcatgatttactaaaggctgcaacttatttaactgtcatgatttactaaaggctgcaactgcttcgccatccagtcggcaataaacggctgggcgtcgcggttgggatgaataccgtcatcctgcatccattgtggcttgaggtagacctcttccataaaaaagggcagcagcggaacatcaaactctttggcgagtttggggtaaatggcgctaaaggcttcattataacggcgaccatagtttgcaggcagacgtatttgcattaacaatggttcagcgttggcggctttgacatcctgcaaaatctggcgcagcgtttgctcggtttgctgtggctgaaaaccacgcaaaccgtcattgccgcccagttcaaccagcacccaacgcggctgatgctgtttcagcagagccggaaggcgcgccagtccttgttggctggtgtcgccgctgatgctggcattaactacgctcgttttactctgccacttatcattcaacaaggcaggccaggccgcgctggcagacattcgatacccggcgctcaggctatcacccagaatcaataacgtgtccgctgcggcggcacggaaggttaacaggaccaggaacaggaagggcaaatgccagcggaaaacattgttgaagttcatcatcttaagaagtccgtcggtcagggggagcatgaactctccatcctcaccggagttgagctggttgtcaaacgtggcgagaccatcgcactggtgggcgagagcggaagcggtaagagtaccttgctggcgatcctcgccgggcttgatgacggcagcagtggcgaagtgagtctggtgggacaaccgctacataatatggacgaagaagcgcgggcaaagttgcgcgcgaagcacgtcggctttgtttttcagagttttatgttaattcctacccttaacgcgctggaaaacgtcgagcttccggctctgctgcgcggtgagagtagcgcggaaagtcgtaacggggcgaaagcgttgctcgaacagttagggctgggtaaacgtctggatcatcttccggcacagctttccggcggtgaacagcaacgagtggcgctggcacgagcctttaatggtcgacctgatgtgctgtttgccgacgaacccaccggcaaccttgaccgccagacgggcgataaaattgccgacctgctgttttccctcaaccgtgaacatggcaccacgttgattatggtgacccacgacctgcaactggcggcacgctgcgaccgctgcttacggctggtgaacgggcagttgcaggaggaagcatgattgcacgttggttctggcgcgaatggcgtagcccgagcctattaattgtctggctggcgctaagcctggcggtggcctgcgtgctggcgctgggcaatatcagcgatcgcatggagaagggcttaagccagcaaagccgtgagtttatggcgggcgatcgggcgttgcgcagtagtcgcgaagtgccgcaagcgtggctggaggaagcgcaaaagcgcggcctgaaagtcggcaagcagctgactttcgccacaatgacctttgcaggcgacacaccgcagctggcgaacgtcaaagcggtggatgatatctacccgatgtatggcgatctgcaaactaatccccctggcctgaaaccgcaggcgggcagcgtattgctggccccacgcctgatggcactgcttaacctgaaaacgggcgacaccattgacgtgggcgatgccaccttgcggattgccggagaagtgattcaggaaccggattccggttttaaccccttccagatggctccgcgtctgatgatgaatctggcggatgtcgataaaaccggagccgtgcagccggggagtcgggtcacctggcgttataaattcggcggcaacgagaaccagctcgacggctatgagaaatggttgttacctcagcttaaacccgaacaacgctggtacggtctggaacaggacgaaggcgcgctggggcgaagcatggaacgcagccaacagttcctgctgcttagcgcgcttctgaccttgctgctggcagtggcagcggtggcggtagcgatgaatcattactgtcgcagtcgctacgatctggtggcgatcctcaaaacgctgggggcagggcgagcgcaactgcgtaagctaatcgtcggtcagtggttgatggtgctgacgcttagtgccgttaccggtggggccataggcctgttgttcgaaaacgtgttgatggtgctgctcaagcccgttctgcctgctgcactaccgccagccagcctctggccgtggctgtgggcgcttggcaccatgacggtcatcagcctgctggtggggctacgaccatatcgcttgttgctggcaacgcagcctttacgcgtattacgtaatgatgtggtagcgaacgtctggccgctgaagttttatctgccgattgtcagtgtggtggttgtgctgctgctcgccggattaatgggtggcagcatgctgctttgggcggtgctggcgggcgcggtagtactggctttgctgtgcggtgtgctgggctggatgctgctgaatgtacttcgccgcatgacgctgaaaagcctgcctctgcgcctggcggttagccgcctgttacgtcagccgtggagtacgttaagtcagcttagcgcatttagcctctcctttatgctgctggcactgctgctggtgttgcgtggcgatctgctcgaccgctggcagcagcagctacctccagaaagcccgaactactttttaattaacatcgccacagaacaggtagcaccgctaaaagcgttcctcgcggaacatcagatagtcccggaaagcttttatccggtggtgcgggcgcggctgacggcgattaacgataagccgacagaaggtaatgaagatgaggcgcttaaccgcgaactcaatcttacctggcaaaatacgcggcccgatcataatccgattgtcgccggtaactggccgccaaaagccgatgaagtgagcatggaagaggggctggcgaaacgcttaaacgttgccctcggtgataccgtgacttttatgggcgatacccaggagttccgcgctaaagtgaccagcctgcgcaaagtggactgggaaagtctgcggcctaatttctattttattttccctgaaggggcattagacgggcaaccgcagagctggcttaccagtttccgctgggagaatggcaacggcatgttgacacaactcaaccgccagttcccgaccattagcctgttagatattggcgcgattttaaaacaggtcggtcaggtgctggagcaggtaagtcgggcgctggaagtgatggtggtactggtcaccgcctgcggtatgttgctgttgctggcacaggtgcaggtgggaatgcgtcagcgtcatcaggagctggtggtgtggcgcacactcggtgcggggaaaaaactgctgcgtaccacgttgtggtgtgagttcgccatgcttgggtttgtttccggcctggtggccgcaattggtgcggaaacggcgctggcagtgttgcaggcgaaagtgtttgattttccgtgggagccagactggcgattgtggattgttctgccgtgcagcggagcgctgctgctgagccttttcggcggctggctgggtgcgcgactggttaagggtaaggcgctgttcaggcagtttgcggggtgatgagagtccctcattaccgcgccttaacccattccgccacttccgcccactcaccgcgaaagacaactttttccgcttttttctcaagctgatagcgatacatcgggtcgtaatattcttcaagtaacggcaccagccaggccagatgaccgtcggtgctgccggtggtgagttgcgttgtcagtgctgcatccagccttgcagccagttcgttatagcgctgtagccccagccgacgcttaatcgcgctaagtccgtgatgcaggtattcgcaatactcctgccagccctgttcgtcgccgtacgcgtgggtaaaatcatgatgcatacgcaagaaatactcttcgttcaggcgctcaagacggatctcaaacggatcttctaccaccgcaatcgccgcctgagtcattcgctcgcgcaggcattccggcaggtgattgctaccgatcatccggctttcgtcttccagcacccacaggcgcaaattctgacgggcgtcggtttttagcatttcggcagccagcaggttttcaaaactcgcctggctaagttgtggttgtaacgtgcgaccaaacgcgctaccgcgatgacgcgccaacccttccagatcaacaccgttcggctgttgctgcactaacagcgttttaccgctgccggtacaaccgccaatcagcactatcggtttttgtgccagttcaatagtcgcctgaatcgcggtctggcgcagtgccttataaccgccttccaccagcggataatcaatccccgctgcatgcaaccagctttgcacaatatgactgcgctgaccgccacgggcgcagcagagaataccttgcggattttgcaggcacgctgcccgccaggcgtccatgcgctgctgacgaatttcacccgccaccagtttatgtcccagcgccagcgctgcgtcactgccttgctgtttatagcaggtgccaacggcggcgcgttcatcgttattcattaacggcagattgatagcggcgggcattgcgccgtgctcaaactcgataggggcgcgaacatcaataatgggcgtatcagcaatcagcagggcacgatagtcctgttccgtgtgtctctcttgcatagttaaaagtgaacctcaaatcagcttgcgcgctattttacgcgccaacgcgcaaggaaacttgatttttaactgcgtgggttgccgaaaatttctaaaaatccgctgatttccggcctgcgctgggtaaacaaggtcacaatatcttctaccgctttgccgctgccaaatttgcgccatgccagactcaatgggctaggagggcgcatcgttgggattacccggctgaccagttgttgattatcgatcatactctggcaaaggctttttggcaaaaaaccaatgccaacgcccgccagatgggcggcgattttcgtttccatatcgggaacaataatctctttttgccctggcaatcgccaggcgacgcgtttggttaaggtgcgggcgctgtcttcaatattgaccgccggaaagcgccgcaactgcgcttctgttagcggctcttcaacgttcgccagcggatgatccgccgccatgacaaagcgccattgcacgcttcctaagggatcaagactaaaggtatttgccagcgcctcagttcccgtgacgccgatagccaggctaaaaccttcgtacaataggctgtcccagacgcccatatagatttgtcgggagatgtgaaactgggtaaaggggtaacgctcattcagccacgccagcaactgggcgacggcctgggggttatagagcaggttgttgatgacaatattcacctggcgttccacgccatcattcacctgttgcagctcgcttggcatactttccagccagctcagccagtctctggcctgggaaagtagatgctcgccagccgctgtcaacgtcacgctgcgagtcgtacggaaaaacagcgctactccggtattctcttccagaagtttaatgcgataactgatcgtcgccgtggttttacataatcgttctgccgctttactaaaacttcctgtttcagcaaccgcaatgaaagtccgcaaggtttctggatcgaacatcttcaggtatccccttttaaatccgcaagttgcgtgattttcttatcctctgatttatcagtatttttacatgataaccctgttcaatttgtggactaaatctagttttggaaaaatattccaacttttgtattgatgttgttctcttaaggttttagattgcctgttattgaaaccaagctgaccggtcggcggtggttgaacggaattatgttacaaggacaaaaagatgaaacttcaggtattaccgttaagtcaggaagcctttagtgcttatggcgacgtaatcgaaacgcagcaacgggattttttccatattaacaatggcctggtggagcgttaccacgatttggcgctggttgagattcttgagcaagactgtacgcttatcagcattaaccgcgcgcaaccggcgaatctgccgctgaccattcacgaactcgaacgtcatccgctgggtactcaggcctttatcccgatgaaaggtgaggtgtttgtggtggtcgtggcgttaggtgacgacaaaccagacctgagtacgctgcgggcgtttatcaccaacggcgaacagggagtgaattaccatcgtaacgtctggcatcacccacttttcgcctggcagcgcgtcaccgattttctgaccatcgatcgcggcggcagtgacaactgtgatgttgaaagtattcctgaacaggaactctgttttgcgtgacgcctgcaaccgacttgcataagataaactaattgttcattgtttatgctcacttgtaggtcggagttaacgtaggtatgacggaagttagacggcgcggcaggccaggacaggcggagcctgtggcacagaagggcgcacaggcgttagagcggggaattgcgattctgcaatatttggaaaaaagtgggggaagtagcagcgttagcgatatttctctcaatctggatttgccgctctccacgacctttcgcttgctgaaggttttacaggcagcggattttgtctatcaggacagtcaattaggctggtggcatataggattaggtgtctttaacgtcggtgcggcgtacatccataaccgcgatgtcctctccgtcgccgggccgtttatgcgccgcctgatgttactttccggcgaaacggtcaatgtcgcgatccgtaacggcaatgaagcggtattaattggtcagttagagtgtaaaagcatggtcaggatgtgtgcgccactgggcagtcgtctgccactgcatgcttccggtgcgggcaaagcgctgctttatccgctggcggaagaggagttgatgagcatcattctgcaaaccggtttgcagcagtttacgccaactacgcttgtggatatgcccaccttgctgaaggacctggaacaagcgcgtgaactgggctataccgtagataaagaagagcatgttgtaggtctgaattgcatagctagtgcaatttacgatgatgtcggtagtgttgttgccgctatctccatctccgggcctagtagtagactgacagaagatcgttttgtcagtcagggtgagctggtcagagacaccgcccgcgatatcagcacggcgttgggactgaaagcacatccataatgtctgtcgcatcccgctctgcggagcgggtttttttgacaaaatttgaaagttggaaaaattttccaataaatagaggtaggaataaaatggcaaaaatgagagccgttgacgcggcaatgtatgtgctggagaaagaaggtatcactaccgccttcggtgttccgggagctgcaatcaatccgttctacagtgcgatgcgtaagcacggcggtattcgtcacattctggcgcgtcatgtggaaggtgctagccacatggcggaaggttatacccgcgcaacggcagggaatatcggcgtatgtctggggacttccggtcctgcgggcacggacatgatcaccgcgctctattccgcttctgctgattccattcctattctgtgcattaccggccaggcaccgcgcgcccgtctgcataaagaagattttcaggccgtagatattgaagcaattgctaaaccggtcagcaaaatggcggttacagttcgtgaagcggcgctggtgcctcgcgtgctgcaacaggcatttcacctgatgcgttctggtcgtccgggtccggtactggtggatttaccgttcgacgttcaggttgcggaaatcgagtttgatcctgacatgtacgaaccgctgccggtctacaaacctgctgccagccgtatgcagatcgaaaaagctgtagaaatgttaatccaggccgaacgtccggtgattgttgccgggggcggggtaattaatgctgacgcagctgcactgttacaacagtttgctgaactgaccagcgttccggtgatcccaacgctaatgggctggggctgtatcccggacgatcatgaactgatggccgggatggtgggtctgcaaaccgcgcatcgttacggtaacgcaacgctgctggcgtctgacatggtgtttggtatcggtaaccgttttgctaaccgtcataccggcagcgtagagaaatacaccgaagggcgcaaaatcgttcatattgatattgagccgacgcaaattggtcgcgtgctgtgtccggatctcggtattgtctctgatgctaaagcggcgctgacactgctggttgaagtggcgcaggagatgcaaaaagcgggtcgtctgccgtgtcgtaaagaatgggtcgccgactgccagcagcgtaaacgcactttgctgcgcaaaacccacttcgacaacgtgccggtgaaaccgcagcgcgtgtatgaagagatgaacaaagcctttggtcgcgatgtttgttatgtcaccaccattggtctgagtcaaatcgctgcggcacaaatgctgcatgtctttaaagaccgccactggatcaactgtggtcaggctggtccgttaggctggacgattccggctgcgctaggggtttgtgccgctgatccgaaacgcaatgtggtggcgatttctggcgactttgacttccagttcctgattgaagagttagctgttggcgcgcagttcaacattccgtacatccatgtgctggtcaacaacgcttatctggggctgattcgtcagagtcaacgcgcttttgacatggactactgcgtgcaactcgctttcgagaatatcaactccagtgaagtgaatggctacggtgttgaccacgtaaaagtagcggaaggtttaggttgtaaagctattcgggtcttcaaaccggaagatattgcgccagcctttgaacaggcgaaagccttaatggcgcaatatcgggtaccggtagtcgtggaagttattctcgagcgtgtgaccaatattagcatgggcagcgaactggataacgtcatggaatttgaagatatcgccgataacgcagcggacgcaccgactgaaacctgcttcatgcactatgaataagggagataaataatgttacgtttctctgctaatttaagcatgttatttggagaatatgattttctcgcccgttttgagaaagctgcgcagtgtggttttcgcggcgttgaatttatgtttccttatgactacgacattgaagaattaaaacatgtgctggcgagtaataaactcgaacatacgctgcacaatttaccggcgggtgactgggcggcgggggagcgcggtattgcctgtattcctggccgtgaagaagagtttcgggatggcgtagcagcagcgattcgttatgcccgtgcgctgggtaataaaaaaattaactgtctggtcggtaaaacgccggctggtttcagcagtgaacagattcacgcaacgcttgtagaaaacctgcgttatgccgcgaatatgctgatgaaagaagatattttattactgattgaacctattaaccattttgatattcctggtttccatctcaccggaactcggcaggcgctgaaattgattgatgatgttggttgctgcaatttgaaaattcagtatgacatttatcatatgcagcggatggaaggtgaattaaccaacaccatgactcagtgggctgataaaattggtcacctgcaaattgccgataatccgcatcgcggcgaaccgggaaccggagaaattaattatgattatctctttaaggtaatcgaaaattctgactacaacggttgggttgggtgtgaatataaaccccaaaccaccacggaagccggtttacgctggatggatccgtaccgttaaaacgtaacgctattcagacaatgcttttttaggccgctaagttggcaggggatcgtgttgtctgaattcaggaaaagcgaaatttaaaagaggttaattatgaaactgggatttattggcttaggcattatgggtacaccgatggccattaatctggcgcgtgccggtcatcaattacatgtcacgaccattggaccggttgctgatgaattactgagtctgggtgccgtcagtgttgaaactgctcgccaggtaacggaagcaagcgacatcatttttattatggtgccggacacacctcaggttgaagaagttctgttcggtgaaaatggttgtaccaaagccagcctgaagggcaaaaccattgttgatatgagctccatttccccgattgaaactaagcgtttcgctcgtcaggtgaatgaactgggcggcgattatctcgatgcgccagtctccggcggtgaaatcggtgcgcgtgaagggacgttgagcattatggttggcggtgatgaagcggtatttgaacgtgttaaaccgctgtttgaactgctcggtaaaaatatcaccctcgtgggcggtaacggcgatggtcaaacctgcaaagtggcaaatcagattatcgtggcgctcaatattgaagcggtttctgaagccctgctatttgctagtaaagccggtgcggacccggtacgtgtgcgccaggcgctgatgggcggctttgcttccagtcgtattctggaagttcatggcgagcgtatgattaaacgcacctttaatccgggcttcaaaatcgctctgcaccagaaagatctcaacctggcactgcaaagtgcgaaagcacttgcgctgaacctgccaaacactgcgacctgccaggagttatttaatacctgtgcggcaaacggtggcagccagttggatcactctgcgttagtgcaggcgctggaattaatggctaaccataaactggcctgatacccgcaataaaaatggccgatatcagaaaatgaatcggccagcaatattaaaaaagaaagcagccaaagatgttgctagtgtattaaaaataatatttttattttatttgttcctcatagctagattaaaacaacgttatagcatacgtgaaattaagagggatttatggaacatcagagaaaactattccagcaacgcggctatagcgaagatctattgccgaaaacgcaaagccagcggacctggaaaacatttaactattttaccttatggatgggtagcgttcataacgttcccaattatgtgatggtcggcggcttttttattctcggcttgtctacctttagtattatgctggcaattatcctcagcgcctttttcattgccgcggtaatggtattaaacggtgctgcgggcagtaaatacggtgtgccttttgccatgatcctgcgtgcttcttacggtgtacgtggtgcactgtttcccggattattaaggggcggaattgccgccatcatgtggtttggtttgcaatgttacgcggggagtctggcctgcttgattctgattggcaaaatctggccgggatttttaactctcggtggtgatttcactctgttaggcctttctctaccgggcttaattactttcttaatcttctggctggtcaacgttggtataggttttggcggtggcaaagttttaaataaattcactgccattcttaacccgtgcatctatatcgttttcggcggtatggcgatttgggcgattagtctggtcgggatcggtccaatctttgactacattccgagcggtattcagaaagcagaaaacggtggcttcctgttcctggtggtgattaacgcggtagttgcggtctgggcggcaccggcggtgagcgcatccgactttacgcaaaacgcccacagctttcgtgagcaggcgctggggcaaacgctgggtttagttgtggcctatattctgtttgcggtcgccggggtatgtattattgccggagccagtattcactacggcgctgatacctggaacgtgctggatattgttcagcgttgggacagcctgttcgccagcttctttgcggtactggttattctgatgacaactatctccactaacgcgaccggtaatattattccagccggttatcagattgccgccattgcaccgacaaaactgacctataaaaacggcgtactgattgccagtattatcagcttgctgatctgcccgtggaaattaatggaaaatcaggacagcatttatcttttcctcgatattatcggcggaatgcttggtccggtaattggtgtcatgatggcgcattattttgtggtgatgcgcggacaaattaatcttgatgaactgtataccgcacctggcgattataaatattacgataacggttttaacctcactgcgtttagtgtaactctggtggccgttattttatctcttggcggtaagtttattcactttatggaaccgttaagccgtgttagttggtttgtcggcgtcatcgtcgcctttgcggcctacgccttattaaagaaacgtacaacagcagaaaaaacaggagagcaaaaaaccataggttaattaatcccgatattgaacattgagttaaaaaccaatctgtattttacaaggagtttgttatgtcttttgatttaatcattaaaaacggcaccgttattttagaaaacgaagctcgcgttgtagatatcgccgttaaaggcggaaaaattgctgctatcggtcaggatctgggcgatgcaaaagaagttatggatgcgtctggtctggtggttagcccgggcatggttgatgcgcacacccatatttctgaaccgggtcgtagccactgggaaggttatgaaaccggtactcgcgcagcggcaaaaggtggtatcaccaccatgatcgaaatgccgctcaaccagctgcctgcaacggttgaccgcgctagtattgaactgaagttcgatgccgctaaaggcaagctgactattgatgcggcacaactcggtggcctggtgtcttacaacatcgaccgtctgcatgagctggatgaagtgggcgttgtcggcttcaaatgcttcgttgcgacctgtggcgatcgcggtatcgacaacgacttccgtgatgtaaacgactggcagttcttcaaaggtgcgcagaagctgggcgaactgggtcagccggtgctggtgcactgcgaaaacgcgctgatttgtgacgaactgggcgaagaagcgaagcgtgaaggtcgcgtaaccgctcatgactatgtggctagccgtccggtatttaccgaagtggaagcaattcgccgcgtactgtatctggcgaaagttgctggttgccgtctgcacgtttgccacgtcagcagcccggaaggtgttgaggaagtgactcgtgcacgtcaggaaggtcaggacgttacttgtgaatcctgcccgcattactttgtactggataccgatcagttcgaagaaatcggtactctggcgaagtgtagtccgccgatccgcgatctggaaaaccagaaaggcatgtgggaaaaactgtttaacggtgaaatcgactgcctggtttccgaccactctccatgcccgccggaaatgaaagccggtaacatcatgaaagcatggggcggtatcgccggtctgcaaagctgcatggacgtgatgttcgatgaagcggtacagaaacgcggtatgtctctgccaatgttcggcaaattaatggcgactaacgcagcagatattttcggtctgcagcaaaaaggccgtatcgccccaggaaaagatgccgacttcgtcttcattcagccgaatagcagctatgttcttaccaatgacgatctggaatatcgccacaaagtcagcccgtatgttggccgtaccattggcgcgcgtatcacgaaaaccatcttacgtggtgatgtgatttacgacattgaacagggcttccctgttgcgccgaaaggtcaatttatccttaaacatcagcagtaatctggcccctgcaatgcccgtccttgcggcgggcattctccggttaaggtgtgtttatgttcaattttgcagtcagccgcgaaagcctgttaagtggatttcagtggtttttctttattttttgcaacacggttgtggttcctcctacgctactttctgcttttcagttgccgcaaagtagcctgcttacgctcacgcaatatgcttttcttgctaccgcactggcctgcttcgctcaggcgttttgcggtcatcgtcgcgctattatggaagggccaggtggcctgtggtggggaaccatccttactatcacccttggtgaagcaagccgcgggacaccgatcaacgatatcgccaccagcctggcagtggggattgcactctccggcgtgctgacgatgttgattggttttagcggattaggccatcgcctggcacggttatttacgccgagcgtgatggtcttgtttatgttgatgctgggcgcgcagctgaccactatctttttcaaaggtatgctcgggctgccgtttggcatagccgacccgaattttaaaattcagttaccgccgttcgcgctcagcgtggcggtgatgtgcctggtactggcgatgattatcttcctgccgcaacgttttgcccgttatggcctgctggtcggcaccataaccggctggttgttgtggtacttttgctttccttctagccacagcctctccggtgagttgcactggcagtggttcccgctcggcagtggcggtgctttgagcccgggaattattctgacggcggtgattacaggtctggtaaatatcagcaatacctacggtgcgattcggggcacggatgttttttatccgcagcagggcgcagggaatacgcgttatcgtcgtagctttgtggcgaccggatttatgacgctgataaccgtaccgctggcggtaattccatttagtccgtttgttagttccattggtttattaacccagactggcgattacacgcggcgtagctttatttatggcagcgttatttgcctgctggtggcgctggttcctgcactcacgcgactgttttgcagtatccctttacccgtgagtagtgcggtcatgctggtttcttatctgcctttactcttttccgcgctggtgtttagccagcaaataacgtttaccgctcgcaatatttatcgactcgcattgccgttatttgtcggcatatttttaatggcattaccgcctgtgtatctgcaagaccttccattaacgcttcgtcctctgctcagtaacggcttattggtcgggattttactggctgttcttatggataaccttattccgtgggaacgcatcgaataatttgttgaaaaaggattgataatgaagattgtcattgcgccagactcttttaaagagagcttaagtgcagaaaaatgttgtcaggcaattaaagccgggtttagcaccctctttcccgatgcgaactatatctgtttgccgatagcggatggcggcgaagggacggtggatgcgatggtcgccgcgacgggcggcaacatcgtgacgcttgaagtctgcgggccgatgggcgaaaaagtgaatgctttttatggccttaccggcgacgggaaaacggcggtgattgagatggcggcagcaagtggcctgatgctggtcgcgcctgaaaagcgtaatccgttgctggcctccagttttggtacgggggagttaattcgtcatgcgctggataacgacattcgccatattattctcggcattggcggcagtgcgacggtcgacggcggtatgggcatggcgcaggcgctcggtgtgcgtttccttgatgccgacggtcaggcgctggcggcaaacggtggtaatttagcgcgcgtggcaagcattgagatggatgaatgcgatccgcgtctggcgaattgccatattgaagtagcatgtgacgttgataacccgctggtaggggcacgcggcgcggcggcggtgtttggcccgcaaaaaggggcaacgccggagatggtcgaagaacttgaacaggggctgcaaaattacgcccgtgttttacaacagcaaactgaaattaatgtctgccagatggcgggcggcggcgctgcgggcggtatgggtattgcggcggcggtatttctcaatgcggatattaaaccgggcattgaaattgtgttgaatgcggtcaatcttgcgcaggcagtgcagggcgcagcactggtgattaccggggaagggcgcatcgacagccaaacggcaggcggtaaagcgccgctgggtgtggcgagcgtggcgaagcagtttaatgtaccggtgattgggattgctggcgtattgggtgatggcgtggaagtggtgcaccagtacggcattgacgcggtattcagcattttgcctcgtctggcacctttagccgaagtgctcgccagcggtgaaaccaatctcttcaacagcgcgcgaaatattgcctgcgccattaaaataggtcagggaattaaaaactaacccttacctttaaagcggatgcgatttatatcgcataagagtgcagtactcatgccggatgcggcatgagtaccatatccttcctgaaaatcgcgcaaattctatatattgcagagatcatgtaggcctgataagcgaagcgcatcaggcaatgttacaaaaaaagccacggtataaaccgtggcaaaatccaacatagctaaaaataatcaggcgagtggtatgacttaaatctctacgtcgcggttacaatctttgctgtaaatatagctgaacgcttcaccacgccctacaccataaccagcctgtaaagaataagcgcccataaagatgtaatcgccttttttcaccgggatccagttattgtcgaggttataaaccccctgaccggaaagaatataggcaccgtgttcctgaacgtgtgtttcgatataaccgtggctggcacctggtgcaaaagagaggatatgcatgttcatatcaaaacctaactctttgggcagaaaatccagcagaataacatcgtccatgccttcataatgaatgcgttccagttcgctggcattgccagaaaccagccacggtgcatagccttctaccggaacatagcggcgcttatataaaaagatttggctgtcttcggcctgggcgttaacaaacgtcattaaggagcctggcgggcaataaagatagccaccttcgcttaaggcaaatgttttgccttcggctttggcagtgatatttccagagatcacatacaggaacgtttcaatgccttcgccaccgaagccctgttggttgccaccgttttgatgcagtgtgaccagataatcaacaaaagaggcacccagctttggcgtggagaggattgtcgcgtcacaattttcaaagcccggaataatattttttaccagaccatccggggttaacagtgcgaaattaccgtgtttaacaatcgcacggttagccagtaaatcttcgcggtaaccggtgacgttatttaaatatcccatttatgactccttatttctgccaggcaagttgataaagcatgagtgccaacgttttgaccccttcggcaaggtcggtaatattggtgcgttccgccgggttatggctgatcccgttgatgctggggataaaaatcatgcaggttggtacgcgaggcgcgaaaatttgcgcgtcgtgcccggcaccactgtgcatcacccggtaattcagtttttctctttcacacaattctgtcagggtggcgaccagctccttattcatcggcacgggttcttcgtccatccataaatcgatatcaataccaatgtccatttcatcgcaaatcgcccgcatgtcgttttctaactgttgggtgaaatcgcgcagcacggcagcgtcggtatgacgacaatcaatggtgaacgtggttttacccggcaccacatttaccgtattcgggcgcggctctactttgccaaaggtcagaaccagcggatcgcccatccttttcgctttttcgacgctctgatggcaaatgcgactgaaagcgtaaactgtatcacgacgataacccatcggcgtggtgcctgcatggttactttcgccgttcagcgttaccgtataacgacgctgcccgacaattgcattcaccacgccaatactttgcccattactttccagcacacagccctgttcaatatgcagttcaacaaaggctttaatatcctgacgcggagttagtggggcgttcggaagagtaaatccgcaagccttcatcgcatcgacaaaactatttcctttggcatcacagatattccgcacgtcgtcaggattcgccagcccaaaaatatttttactgccccagaagacatacgggaagcggctgccttcttcttctgccatcgccaccacttcgaccgtacgtagcggcgcgccgtattgcgttttcagccagtcaattgccagccacgccgccagcgcgccgaattgcccgtcaaggttaccgccgttaaccacggtatcgatatggctaccgctcagaaccacttcctgtggatattcggtgccattcaggcgaccgtataaattccccacttcatcgaaacgtgtttccagcccgcttgctgccattctttttttaaattgctgctgggtttccagccattccgggctataaagtaaacgggtcatcccacccgctgggtcagcgccaaaagaggaaagccagggcagcgtttcttctatagcttgacggaaatgtgtaatcataagaaagtcctgtctcaataattattgcgcaaagggatttttcgtttcgtaactcgtgttataaagcgcgtcggaaattaaatactggtaaatatcatcaacaatttcgatgccttcgacggcggctttgcgttgtttaatatcctgatcctgtccgggataataaacctgattaaaaccgggcgcgggggtaatggcatttaattcgcgcatggtctggctaagatgttgacggaataattcgctggaggagaaaaagttcggattaataactatatgtaattgccccaaattacgccctgcgtgtaaatcgtcatacatgctactaacctgtcgcccgaacggtaagccgagtaagacgccactgaggacgtcaatcatcatcatcaggccatacccttttggcccggcggcggggagcagagcatgtaccgcgaacggatcggttgttggtacaccgtttttatcgaccgcccaggtatccgggatagacatattacggctgcgggcgtcgagcacttttccccatgcctgtacggtagtcgccatatcaaaggtaaggatctcgtcgccttctcccggcgcggcaaaggccagggggttagtaccgtagtaaatttccgcgccgccaaacggcaccaccattggatcggactggcacatgctaatgccaatgaatccggcgcgggctgcctgctgcacaaaataagagattgcgccgctgtgacccatccggctgataccgaccaccgcaacgccattttgctgggcggttttgatggcatgttccatacccattttcgccgcgacctgtccggcggcattgtcggcatgtaaaattgcgctgcacggcccggtttcctcaagacgaaactccggttcgcggttggtgccgcctttactaatgcgttccgcgtagtattccacgcgcaccgcgccatgagagtggatccctctggcatcggcgtaaaccaatacttcagccacggttgcagcgtgctcacgttttaacccagcctggcagagtttattctcaattagctggtggagtgtttcccgactgattttcatctgtcttcctttttaacgacggtgtgaagcatgactgcaattaacatacagggaaaatatctggattatgtgatccagacaggcaaaaaaatatagttagaatttatttgataatccgctcacttttaacctgatttttaaaacaacaacgcttattaaaaaataatgagtaatagcctggtggttatttgaattcttttgttaataattcctgtgtgatattcatcaccttatttactcgttgtcatcgataccgtaatcgccacattaacactgctcgtgcaattgccatgggtgcaatttttaaggagttgttatgatccacgcctttattaaaaaagggtgttttcaggatagcgtcagtttaatgattattagtcgaaaactcagcgaaagtgaaaatgttgatgatgtttccgtaatgatgggtacgcccgccaataaagcgttattagataccacaggtttctggcatgacgattttaataacgccacgccgaacgatatttgcgtggcaattcgtagcgaagcggcggatgcggggatcgcgcaggcgattatgcagcagcttgaagaggcgctaaaacaactggcgcaggggagtggcagcagccaggcgttgacgcaggtgcgtcgctgggacagtgcctgtcagaaattacccgatgccaatctggcgctgattagtgtggctggcgagtatgcggcggagctggcaaaccaggcgctggatcgcaacctcaacgtgatgatgttctccgataacgtcacgctggaagatgaaatccaacttaaaacccgcgcgcgggaaaaaggcttgctggtgatggggccggactgcggtacgagcatgattgccggcacaccgctggcttttgctaacgtgatgccggaaggcaatattggcgtcattggcgcttccggtaccgggattcaggagctgtgtagccagattgcgctggcaggggagggaattactcacgcgattggccttggcgggcgcgacctcagccgtgaagtgggcggcatcagtgcgctaacagcgctggaaatgctcagtgcagacgagaaaagcgaagtgctggcatttgttagtaaaccacctgccgaagctgtgcgtctgaaaattgttaatgccatgaaagcaaccggcaaaccgacggtggcgctgtttttaggttataccccggcggtggcccgcgacgagaatgtctggtttgcctccagcctggatgaggccgcacgcctggcttgcctgcttagtcgcgtcacggcgcgacgtaacgcaatagcgcctgtcagcagcggatttatttgcggtttgtataccggcggtacgctggctgccgaagcggcgggattacttgccggacaccttggcgtggaagccgacgatacccatcaacatggcatgatgctggacgccgatagccaccagattattgacctcggcgatgatttctacaccgtcgggcgtccccatccgatgatcgacccaaccttacgcaaccagttaattgccgatctcggcgctaaaccgcaagtgcgcgtgttgctgcttgatgtcgtgattggcttcggtgcgaccgccgatcctgccgccagcctggtgagcgcctggcaaaaagcctgtgccgcgcgtttagataatcaaccactgtatgccattgccacggtgacaggcactgaacgtgacccgcaatgccgcagccagcaaatcgccacgctggaagatgcggggattgcggtcgtgagtagcctaccggaagccaccttgctggcggcagcgttaattcatccgctcagccctgccgcacagcaacacacaccgagtttactggaaaacgtcgccgtgattaacatcggattacgcagctttgcgctggagctacaaagcgccagcaaaccggttgtgcattaccaatggagcccagtcgccggtggcaataaaaaactggctcgtttattagaacgtttgcaataaggggttcccatgtttacatcagtggcgcaagccaatgctgcggttatcgaacaaattcgtcgcgctcgtccacactggctggatgtgcaaccggcttcttcacttatcagcgaactaaacgagggcaaaacactgcttcacgccgggccgccaatgcgctggcaggagatgaccggacccatgaaaggggcgtgcgtgggcgcatgtctgttcgaaggttgggcgaaagatgaagcgcaggcgctggcaatactggagcagggggaagtgaacttcattccttgtcaccatgtgaatgccgtcgggccaatgggcggtattacttctgccagtatgccgatgctggtggttgagaacgtgaccgacggcaaccgggcgtactgcaacctcaacgaaggtatcggcaaagtgatgcgttttggcgcttacggcgaagatgtcctgactcgccatcgctggatgcgcgatgtgttaatgccagtattaagcgcggcgctggggcgcatggagcgcggtatcgatctcacggcgatgatggcgcagggcattacgatgggcgatgagttccatcaacgcaatattgcttcctctgcactgttaatgcgtgcgctggccccacaaattgctcgcctcgatcatgataaacagcacatcgccgaagtgatggatttcctcagcgtgaccgatcagttcttcctcaacctcgcgatggcttactgcaaggcggcgatggatgctggcgcgatgatccgcgcaggcagcatcgtcacggcaatgacccgcaacggcaatatgttcgggattcgggtaagcgggctgggcgaacgctggtttactgcgcctgtaaacactccgcaaggtctgtttttcaccggcttctcgcaggagcaggcgaacccggatatgggcgatagcgcgattaccgaaacctttggtatcggaggtgcggcaatgatcgcagcgcctggcgtaacgcgctttgtcggtgcgggtggcatggaagcggcaagagcggtatctgaagagatggcggaaatttaccttgaacgcaatatgcagttgcagatcccaagctgggattttcagggcgcgtgcctggggctggacattcgtcgcgtggtagaaaccggcattacgccactcatcaataccggtatcgcccataaagaggcggggatcgggcagattggcgcaggcaccgtgcgggcaccgctggcgtgctttgaacaggcgctggaagcactggctgaaagcatgggtattggttgaggaacgcgcaatgacgatcatccatcctctgcttgccagtagtagcgcaccgaattatcgccagtcctggcggttagcgggagtgtggcggcgggcgattaacctgatgacggaaagcggcgaactgttaacgttgcatcgtcagggtagtggtttcggccccggaggatgggtgcttcgccgtgcgcaattcgatgcgttatgcggtggattatgcggcaatgaacgaccacaggttgtggctcaagggattcgcctcgggcgtttcacggttaaacagccacagcgttattgtttgctgcgtattacgccgcctgcgcatcctcaaccacttgcagctgcatggatgcaacgcgcggaggaaaccgggcttttcgggccactggcgttggcggcaagcgatccgctgcctgctgagttacgccagtttcgtcactgttttcaggccgcgctcaatggcgttaagaccgactggcggcactggctgggtaaaggccccggattaacgccgagtcatgatgacacgctgagcggaatgctgctggcggcctggtattatggcgctttagatgcgcgctccggtcgtccgttttttgcctgttccgacaatctgcaactcgttaccacagcggtgagcgtcagttatttacgttatgccgcgcaaggatatttcgccagcccactcctgcactttgttcatgctctgagttgcccgaaacgtaccgctgttgcgattgatagcctgctggcgctggggcatacgagtggggcagatacgctgctggggttctggcttggccaacaattattacaaggaaaaccatgaaaacactggttgtggctcttgggggcaacgccttactccagcgcggtgaggcgctgacggcagaaaatcaatatcgcaatatcgccagtgctgtacccgcgctggcacgcctggcccgttcttatcggttggcgattgttcacggcaacgggccgcaggtggggctgctggcattgcagaatctggcgtggaaagaggtagaaccgtatccgctggatgtgctggttgcggaaagccaggggatgattggctatatgctggcgcagagtttgagcgcacagccgcagatgccgcccgtgacgacggtgctgacgcgcattgaggttagccctgatgatccggcgtttttgcagccagagaaatttattggtccggtttatcagccagaagaacaagaggcactggaagcggcttacggctggcagatgaaacgtgatggtaaatatttgcgccgggtggtggcgtctccgcaaccgcgtaaaattctcgacagcgaagccatcgagttgttgctcaaagaggggcatgtggtgatttgcagtggcggcggcggtgtgcctgtgacggatgacggagcagggagtgaagcagtgattgataaagatctcgccgctgcgttgctcgccgagcagattaatgcagatggactggtgatcctcaccgatgctgatgcggtatatgaaaactggggaacgccgcagcaacgtgccattcgccatgccacaccggatgagttagcgccatttgccaaagccgatggtagcatggggccgaatgtaacggcggtgagtggttatgtcagaagccgtggtaaacccgcgtggattggggcgttaagccgaattgaagagacgctggcgggcgaagcggggacctgtattagcctgtaatcgtaggcattagacatttgtgcctgatgcgacgcttgacgcgtcttatcaggcctacaaccggtgccgcatccggcaattggtgcacaatgcctgatgcgatgcttgacgcatcttatcaggcctacaatgggtaccggatcggtaggccggataaggcgtttacgccgcatccggcaagaatagagcaccagttaaccgaacttactctgcgcccaaatcacgccgctggcatattccggcggcagcagcgggattaaggcttccagcgtcgcagtcagacggcttgtgtcgctgtcggtcaaattcagatgccccactttacgccccggacggacttctttgtcgtaccagtgcagatgcaccagcggcagtttcagccagtcataattcacatcgctaccaatcagattgatcatcacgctcggattattcaccactggttgcggtaacggcagatcggtaatcgcccgcagatgcagctcaaactggctgatgctggcaccgttttgtgtccagtgaccgctgttatgcacacgcggtgccagttcgttgatcaacagaccttgcggggtgacaaaacactccatcgccatcacgcccacatagcccagctcctgcataatcgcgctcagcatctcttcggcttgcgcctgctgctgtgcgttggcctgcggaaaagcgacgctggtgcgcaaaataccgtcctgatgcaggttatgcgtcagcggataaaacacggtgctgccatcaaagccgcgcgcgccaaccaggctcacttcaccagagaagttaatgccctgctcgacaatacattcgccgtaacactctgccggtaactgttcggtttcatttgcgcgtaaacgccattgaccgcgaccgtcataaccaccagtgcgacgcttaacaatcgccagctcacctaaacgatcaaacaccgcaggccactcgctgcgttcggcaagtaactgccacggtgcagtcggcaggtggagcttatcgaaaagctgcttctgagtcagacggtcagcaataatcgggaacacatcgcggttcacaaaggccggatggcgcgccagctcgcgggttaatgcggtttccggccagcgttctatctcagcggtaatcacgctttgttgaaaaggcaccgccgccggttcagcgtccagcccgactggccagacagcaatgcctaacggttcgcctgcctgacgcagcatacggcctaactgcccgttaccgaggacgcaaacctgtttcatgccgcacctcgcgggtccgggttttccagcacttcgtcggtctgggctttgcgccagtcattcagacgctggtgcagttctttatcatgagtcgcaagaatttgtgctgccagtaacgccgcgtttgccgcgccagctttaccaatcgccagcgtacccaccggaatgccgcgcggcatttgtacgatggagtagaggctatcgacaccgctcagtgcggcgctctgtactggcacgcccagcaccggcaccagcgttttggcggcaatcatgcctggcagatgcgctgcgccgcctgcgcccgcaataatcacctgataaccgttctcttcggcgctttcggcgaagctgaacagtttatcgggggtgcggtgagcagaaaccacttcaacgtggtgcgggacattcaggatttcgaagatttcggcggcgaactgcatggtagcccagtcgcttttggaccccatcacgatggcgacacgcgccggattattgcgggaagacatgcgtcttaaaactcctgtggtgcacaactctcggctttagagggcacagagaatagcacggaaagagagcaaggaaaacggttgcgtggctgtgaaatcagcaaagttgcgggttttttaaaacggaaaatgaatcagctcaacgtcatccgccgtgactttcaccatactaccttccgtatgccaggcacccagtaccacgcgaaaagcaggttgctgattggcgataagttcatgcaccgccgggcgatgggtatgcccgtggatcagccattgcacctgatgtttttccatcgcactgaccaccgcgttttggttaacgtccatgatcgccaggcttttactgctgttggcttctttgctgttcgcgcgcattcgcgcggcaatgcgtttgcgcacaaacaacggcagggcgaggaatagcgtctgcagccagggtttgtggaccttggcgcgaaaagcctgataacccgcgtcatcggtgcacagcgtgtcgccatgcataatcaacacccggcgaccataaagttcgagcaccttttcttccggcaataacgtcatgccactttcacgggcaaagcgtttgccgagcagaaaatcacggttgccatgaatgaaataacagggaacgccggaatcggacaccgctttgatcgccgccgccatcttgcgatggagtgggttgggatcgtcgtcgccaatccatgcttcaaacagatcgccaagaatatacagcgcgtcggccttgcgggcttcccccgctaaaaaacgcagaaaaccggcggtgatcgccggttcttccacgcagagatgaagatctgcaataaagagtgtcgccacgattactcgctaacggtcacgctttcaatgataacgtcttcttttggcacgtcctggtgcataccgctacgaccggttgcaacacctttgattttgtctaccacgtccatgccgtcaaccacttcagcaaacacgcagtagccccaaccttgcaggctttcgccagagaagttcaggaagtcgttatcaaccacgttgatgaagaactgtgcagttgcagagtgcggagcctgagtacgtgccattgccagcgtaccacgggtatttttcaggccgttgttggcttcgtttttgatcggttctttggtggctttttgtttcatgcccggttcaaaaccgccgccctgaatcataaagccgttgataacacggtggaaaatggtgttgttgtaaaaaccttcgcggcagtagtccaggaagtttttaactgtttcaggtgctttatcgtcaaaagttttgatgacaatatcgccgtgattggtgtggaaagtaaccatttttgcatcctgttccgtttgattggtgcttcaacccagttcgggtcatatatagggtggtgttatagcataaccgcacgatcggatcatcacgcaatgtatgctgattcgcgcgggaaatatgggtattatacgcaactcaattacccacacatgtctaaacggaatcttcgatgctaaaaatcttcaatactctgacacgccaaaaagaggaatttaagcctattcacgccggggaagtcggcatgtacgtgtgtggaatcaccgtttacgatctctgtcatatcggtcacgggcgtacctttgttgcttttgacgtggttgcgcgctatctgcgtttcctcggctataaactgaagtatgtgcgcaacattaccgatatcgacgacaaaatcatcaaacgcgccaatgaaaatggcgaaagctttgtggcgatggtggatcgcatgatcgccgaaatgcacaaagattttgatgctttgaacattctgcgcccggatatggagccgcgcgcgacgcaccatatcgcagaaattattgaactcactgaacaactgatcgccaaaggtcacgcttatgtggcggacaacggcgacgtgatgttcgacgtcccgaccgatccaacttatggcgtgctgagccgtcaggatctcgaccagctgcaggcaggcgcgcgcgttgacgtggtcgacgacaaacgcaacccaatggacttcgttctgtggaagatgagcaaagagggcgaaccgagctggccgtctccgtggggcgcgggtcgtcctggctggcacattgaatgtagcgcaatgaactgcaagcagctgggtaaccactttgatatccacggcggcggtagtgacctgatgttcccgcaccacgaaaacgaaatcgcgcagtccacctgtgcccatgatggtcagtatgtgaactactggatgcacagcgggatggtgatggttgaccgcgagaagatgtccaaaagcctgggtaacttctttaccgtgcgcgatgtgctgaaatactacgacgcggaaaccgtgcgttacttcctgatgagcggccactatcgcagccagttgaactacagcgaagagaacctgaagcaggcgcgtgcggcgctggagcgtctctacactgcgctgcgcggcacagataaaaccgttgcgcctgccggtggcgaagcgtttgaagcgcgctttattgaagcgatggacgacgatttcaacaccccggaagcctattccgtactgtttgatatggcgcgtgaagtaaaccgtctgaaagcagaagatatggcagcggcgaatgcaatggcatctcacctgcgtaaactttccgctgtattgggcctgctggagcaagaaccggaagcgttcctgcaaagcggcgcgcaggcagacgacagcgaagtggctgagattgaagcgttaattcaacagcgtctggatgcccgtaaagcgaaagactgggcggcggcggatgcggcgcgtgatcgtcttaacgagatggggatcgtgctggaagatggcccgcaagggaccacctggcgtcgtaagtaattgcgctattgccggatgcgagttttcgcatccggttatcgtctgcgccaccacaacattcccatcagtagcatccccggcaaccacacccacatcaattcagaaataatcacctgatgcccgtacggcgtggtgtaacgagacaatgcaaacggcgcgacttttatcacctgccagggagcgaaaaagcgttcatcactccacggccacagccagccaacgcctttaccgccagtggttacgctatccagcaagctgtggcttagcaagctgacggttaaaaacagccagcagcgaatcagcccagccctgaaccatcggcgtccaataaacacacataacagcgggacaacaaacgcaaacaccaggctatgggtaaacccgcgatgaccaaaaacattgccgtaagcaacgccaaatttaaagctcaatacgtcggcgtcgggcagcatcgccaggatgattccggcaaataacagacgcggagggatgactttgctacccaaccctaaaccaatgcataggggaacggcggcgtgcgtaataacggttggcatgatggtcgcttcggcaaaatgtcgatgctatcagcatggatgaacggggcgtagagggcaaaagtctgaaaagagaaccggcctgttgatacaggccgggaaagggatcaggcaacaacctgtacgctgtgacctgcaaaactcactgtctgaccggcgacgattttgcagcgtttgcgcgtttcaaccgcaccgtcgactttcacctggccttcggcaatcgcgattttcgcctgcgcgccgctttcgctccagccttccagtttcagcaagtcgcacagctcaacgtgcggatgtttacctaaagaaaatgtcgccatgttactcatcctgtggatcatgatattcaacgcacgcctgtagcgtgttttcaatcagcgtggcaaccgtcatcgggccaacgccgccgggaacaggcgtaatgtaactggcgcgtttagccgcgtcttcaaacacgacgtcgcccacaactttgccattttccagacggttgatgccgacatcaatcacaattgcgccttctttgatccagtcaccgggaataaagcctggcttgccaacggcaacgatcaatagatcggcattttctacgtgatgacgcagatttttagtgaagcggtgagtcactgtagtggtgcaacctgccagcagcagttccatgctcatcgggcggccaacgatattgcttgcgccaatcaccacggcgttgaggccgaaggtatcaatgttgtaacgctcaagcagcgtgacgataccgcgcggggtgcagggacgcagacgcggcgcgcgctggcacagacgaccgacgttgtaaggatggaaaccgtccacgtctttgtccggatgaatacgttccagcactttgacgttatcaatacccgccggtaacggcagttgaaccagaatgccatcgatggtgttgtcggcattcagcgtatcgataagctccagcagctccgcttcgctggtggtttccgggaggtcataagagcgggagacgaacccgacttcttcacaagccttgcgtttgcttgcgacataaatttggcttgcagggttactacccaccagcacaacggccagtcctggtgcccgcagtccggctgcaatacgcgcctgaactttttgagcaacttcagagcgcacctgctgcgcaatcgttttaccgtcaataatctttgctgccatcagagagaggattccatctgttacgtagatcgaaggggatgcgcctattttgtcagaagcggggcgcgctgtcaggtttcgtttcagatttatcgcgtgaagcgacctcttgcgaaggtgaggcgcaccgtcgctgagactgaaagcttcatttttcgtccatgatggcgttgtaaatctggaactgatttatttccttgtctaaggattaagataatttaagaaatacctgacaatataaaaagaattttcagcctggtaatttaccgcttcaggtctatatttgtgttgaatatattttgcgcggaagtattcatctaacggggctctctattttttagaatagagtgcatattttcaattaagacattcttagaggataaaaaggaatttactactatcagtgtcttaaataaagtaatcggttatatacggatgtggagtcgataaatgagattgaaggaatatatatgaaattaagatttattagctctgcgctggctgccgcactattcgccgctacgggtagttatgctgccgttgtagatggcggtacaattcactttgaaggcgaactggtgaatgctgcctgtagtgtgaatactgacagcgcagaccaggttgtcacactcggtcaatatcgtaccgatattttcaatgctgttggtaatacctctgcattaattccattcaccattcagttgaacgactgcgatcctgttgttgccgctaatgctgccgttgcattttctggtcaggctgatgcaatcaatgataatttattggccattgcatccagtaccaatacaacaacagcaacgggtgtcggtattgaaatacttgataatacatccgcaattctcaaacctgatgggaatagcttcagtaccaaccagaacttgatccccgggaccaacgttcttcatttttctgcacgttataaaggcaccggtacaagtgcaagtgcagggcaagcaaatgctgacgcgacttttattatgagatatgaataatcaaaaccacgttgttttgaattatatatcacgtcttataacaaagtaatgtaccggttgtctgaagcggtatggtggcaatgtaaatcgaaatcatgttcactttgtatcatgccgctttattaaatgaaaagggaatgatgtgttgtaagaaaccaaagcaatcatttctttatattccttatttttgccgtcaggaatacacaaggcgtattaactatgatgactaaaataaagttattgatgctcattatattttatttaatcattagcgccagcgcccatgctgccggagggatcgcattaggtgccacgcgtattatttatcccgctgatgctaaacagactgcggtatggattagaaatagccataccaatgagcgctttctggtcaatagctggattgaaaacagcagcggtgtaaaagaaaagagtttcatcattacaccgccactgtttgttagtgaacccaaaagcgaaaatactttgcgtattatttacaccggtccaccgctggcagcagatcgtgagtctctgttctggatgaatgttaagacgatccctagcgtagataaaaatgcattgaacggcaggaatgttttgcaactggcgattttaagccgcatgaaattatttctccgtccaattcaattacaagaattacccgcagaagcgccggacacactcaagtttagccgatccggtaactatatcaatgttcataatccaagtcctttttatgtcaccctggttaacttacaagtgggcagccaaaagttggggaatgctatggctgcacccagagttaatagtcaaattcccttacccagtggagtgcagggaaagctgaaatttcagaccgttaatgattatggtagtgtaactccggtcagagaagtgaacttaaactaaccgaatcatctgacaatatcagagctaattatgaaaatacccactactacggatattccgcagaggtatacctggtgtctggccggaatttgttatagttctcttgccattttaccctcctttttaagctatgcggaaagttatttcaacccggcatttttattagagaatggcacatccgttgctgatttaagccgctttgagagaggtaatcatcaacctgcgggcgtgtatcgggtggatctctggcgtaatgatgagttcattggtagccaggatatcgtatttgaaagcacaacagaaaatacaggtgataaaagtggtgggttaatgccctgttttaaccaggtacttcttgaacgaattggccttaatagcagtgcatttcccgagttagcccagcagcaaaacaataaatgcatcaatttactgaaagctgtacctgatgccacaattaactttgattttgcagcgatgcgcctgaacatcactattcctcagatagcgttgttgagtagcgctcacggttacattccgcctgaagagtgggatgaaggtattcctgctttactcctgaattataatttcaccggtaacagaggtaatggtaacgatagctatttttttagtgagctcagcgggattaatattggcccgtggcgtttacgcaacaatggttcctggaactattttcgcggaaatggatatcatagtgaacagtggaataatattggcacctgggtacagcgcgccattattccgctgaaaagtgaactggtaatgggagacggcaatacaggaagtgatattttcgatggcgttggatttcgtggtgtacggctttattcttctgataatatgtatcctgatagccagcaagggtttgccccaacggtacgtgggattgcccgtacggcggcccagctaacgattcggcaaaatggttttattatctatcaaagctatgtttcccccggcgcttttgaaattacagatttgcacccgacatctagtaatggcgatctggacgtcaccatcgacgagcgcgatggcaatcagcagaattacacaattccgtatagtacagtgccaattttacaacgcgaagggcgtttcaaatttgacctgacggcgggcgattttcgtagcggtaatagtcagcaaagtagccctttcttttttcagggtacggcactcggcggtttaccacaggaatttactgcctacggcgggacgcaattatctgccaattacaccgcctttttattagggctggggcgcaatctcgggaactggggcgcagtgagcctggatgtaacgcatgcgcgcagtcagttagccgacgccagtcgtcatgagggggattctattcgcttcctctatgcgaaaagcatgaacaccttcggcaccaattttcagttaatgggttaccgctatagcacacaaggtttttatacccttgatgatgttgcgtatcgtcgaatggaggggtacgaatatgattacgacggtgagcatcgcgatgaaccgataatcgtgaattaccacaatttacgctttagccgtaaagaccgtttgcagttaaatgttagtcaaagtcttaatgactttggcagcctttatatttctggtacccatcaaaaatactggaatactagcgatagtgatacgtggtatcaggtggggtataccagcagctgggttggcatcagttatagcctcagttttagctggaatgaatctgtagggatccccgataacgaacgtattgtcggacttaatgttagtgtgcctttcaatgttttgaccaaacgtcgctacacccgggaaaatgcgctcgaccgcgcttatgcctcctttaacgccaaccgtaacagcaacgggcaaaatagctggctggcaggtgtaggtgggaccttactggaaggccacaacctgagttatcacgtaagccagggtgataccagcaataatgggtacacgggcagcgccacggcaaactggcaggccgcttacggtacgctggggggcgggtataactacgaccgcgatcaacatgacgttaactggcagctgtctggcggtgtggtcgggcatgaaaatggcataacgctgagccagcctttaggggataccaatgttttgattaaagcgcctggcgcaggcggtgtacgcattgaaaatcaaactggcattttaaccgactggcgcggctatgcggtgatgctgtatgccacggtttatcggtataaccgtatcgcgcttgataccaatacgatggggaattccatcgatgttgaaaaaaatattagcagcgttgtgccgacgcaaggcgcgttggttcgtgccaattttgatacccgcataggcgtgcgggcgctcattaccgttacccagggcggaaaaccggtgccgtttggaagtctggtacgggaaaacagtaccggaataaccagtatggtgggtgatgacgggcaagtttatttaagtggtgcgccattgtctggtgaattactggttcagtggggagacggcgcgaacagtcgctgcattgcgcactatgtattgccgaagcaaagcttacagcaagccgtcactgttattagcgcagtttgcacacatcctggcagttaaaggaaattatcaataagataatctgcagattattattggcgatggcatgtttgtgtctggcaaacatatcctgggctactgtttgtgcaaatagtactggcgtagcagaagatgaacactatgatctcagtaatatctttaatagcaccaataaccagccagggcagattgttgttttaccggaaaaatccggctgggtaggtgtcagtgcaatttgtccacccggtacgctggtgaattatacataccgtagttatgtcaccaactttattgttcaggaaactatcgataattataaatatatgcaattacatgattatctattaggtgcgatgagtctggttgatagtgtgatggatattcagttccccccgcaaaattatattcggatgggaacagatcctaacgttagccaaaaccttccattcggggtgatggattctcgtttaatatttcgtttaaaggttattcgtccctttattaacatggtggagatccccagacaggtgatgtttaccgtgtatgtgacaagtacgccttacgatccgttggttacacctgtttataccattagttttggtggccgggttgaagtaccgcaaaactgcgaattaaatgccgggcagattgttgaatttgattttggtgatatcggcgcaagcttatttagtgcggcagggccgggtaatcgacctgctggtgtcatgccgcaaaccaagagcattgcggtcaaatgtacgaatgttgctgcgcaggcttatttaacaatgcgtctggaagccagtgccgtttctggtcaggcgatggtgagcgacaatcaggatttaggttttattgtcgccgatcagaacgatacgccgatcacgcctaacgatctcaatagcgttattcctttccgtctggatgcagctgcggcagccaatgtcacacttcgcgcctggcctatcagtattaccggtcaaaaaccgaccgaagggccgtttagcgcgctggggtatttacgcgtcgattatcaatgaggtacggagaatgagaagagtactctttagctgtttctgcgggctactgtggagttccagtggatgggcagttgaccctttaggaacgattaatatcaatttgcacggtaacgttgttgatttctcctgtaccgtaaacacagcggatattgataagacggtagatttaggcagatggcctacgatacaactactgaacgctggcgataccacggcactcgtcccttttagcctgcggctggagggatgtcctccgggtagtgttgcgattttatttacgggaacgccggcatccgataccaacctgctggctctggatgatcccgcaatggcacaaaccgtcgccatcgaattacgtaatagcgatcgctcccggctcgcactgggggaggcgagcccgactgaggaagtagatgcaaatggcaatgtcacactaaacttttttgccaattatcgagcgttagccagcggtgttcggccaggtgtggcgaaagcggatgcgatatttatgatcaattataattaatattatattaattcgtataatttggcgtagtcgataagctctacaatactatgcaaacctagcttgccataaatattagatttatgcgcactaactgttttattgctaagtaataacttatcggcaatttctttattagataatccgctaaccagataacgtaatatggtcacttcacgattagatagcacagtgaccgtactactattcgtactacatttattgctttttatatagttaagcgtttcgctgggaaaaaacgtgtatccggagaggatcatctgaacggcatgaaaaatatcattctgatcattgcatttactgacaaaaccgttagcaccagcttgtatcgctctgccagcataaaagcattcacttttgctacttaaaaataacactttcactgtgctctggatttgtttgatccttttcaggaaggtaaaaccgtctgttccgggcaagtctatatccataatgattaaatcaacaggacgggttcggagataatcgatggttatgcgataatcatccgttttcaggacaatctgcaattcactgtttttttgcaacagaacttcaatagacattctgatgataggatgagtatccataatgatcacgctcgttggtttcatagttaccagtctcataggagcggacaattttccgttaggtcgggaaattgtactttgatacatgaaaatacgggttttcttgattcagacgcgcagcggtgtgcgtttgtttgccgctatagcgaaataaatcagaaaatcagacgcggtcgttcacttgttcagcaaccagatcaaaagccattgactcagcaagggttgaccgtataattcacgcgattacaccgcattgcggtatcaacgcgcccttagctcagttggatagagcaacgaccttctaagtcgtgggccgcaggttcgaatcctgcagggcgcgccattacaattcaatcagttacgccttctttatatcctccataatttcagagtgggacatatttgggacattatcaccaaaaatgtcgtctattttcctcgcatgctctgtcaaatgattaggcgcaaggtgagcatacctacgaaccatttctatggactcccatccgcccatttcctgaagcactgataatgggacgcctgactgaatcagccagcttgcccaggtgtgtctgaggtcatggaaacggaaatcttcctcatttatgcccgtcttatccgtttccgctttgcccttcaccacatcactttttgtcgctgtttggcgagataattcaacggtgtcaggccgtaaaacgccttaaaaacagagataaagtagctcgtgctgctatagccacataattgcgccacctgagtgatatttttgttatccatcaataacatctgtacggcgtaacgcatacgacactctgtgacaatctggctatagctggtattttcgttttttaatttctttttgagcaggctggggcttaaacataggctactggcgacaattcgcagattccagtaatgctgaatatcgctttgaataatgcggcagacgctgtcgcggacgctgctgcgtaagatatacatcagtagggcaataaaccggctttgctcaagaaagttagacaatacggtaaaaagcaatgcgcgcgtcaactccgcttcgcagggtctgctgggttgctgcttgctgtggttggcggctagccggaacacttccggtgtacggctatgacaagcgataaccggggttgccagccggctccagggctttacacaggttaagttcttatttaaaaacaacagataatcgttgatgatgttacggttgatgtgggtgattaatacgtgatttaacgtactgagttcaatgacgttattgttgcacgcgaaggcggccaggtagtttttcggaagggtaaacgtagcatggttattgacgcttacctctacctctttttcggtcaggatcaccacgcaaggttcactgctgctcaattgcatttcgcactcctcagatatcagaaactccgctcaaaggatctatgcttcctgcatgagtgatcggcccgttcgccgataacgatcttctttctttagcacgctttttagcaattaatcttgatggaattctgatgagagcgaaagaggtaagccaggtcgtacccgacttacctggaggagatttaatactcgagaatgccgtgcgcgacgggcaaatagcgcagagagaaatagagagtgtctttaccgcaagaggaacgtttcgctaacaggctggcaatttctgcgtccggtttcggtttcgctgtaaaggttttgcctttgccggcgacaaaaagttcataaacaacgccgctggcaggggcgggactttggcaatcggcgctggcctgtaaataacgttcacgctgttcagcggtcagtttatccacgccgctgccatcctgtacccagacattaacgccggttgctttaacgtgttccagcagttggcgatagccatcggggctcatgtttccggcgaaaaaactactgatataaaccggttttgcactaacatcgctaatcagccgctgcgcgttgtttaaccatgttagcaaaggctgacgggcggcttcgctgcgccagttcaggtcgtcaatttccgcgctgatgtaccagccatccggcgttatgccaggcgcggcgctccataatctggcttgctggagatcggcagccagcaggcgattaagatagctttccagcgctgcggagctctgtttctggtgcataaaaaattccggatcggcgttcagcccgacaataagcttcagaccagcctgttgcgcagctgcggcccgcttaaacaataacgtgcgctgttctggctgggtaaatgcatcgccgtaacgggtccattgcaaaacaagggtatcgaagccttgcaaacgtaactgactcatcagcccctgccactgggtatcggtaacctgactatctcggttttgtggttgccagataatacctttcatcgcaaaggaaaaagggctgaccaaaagcagtgtcagcaatacgaaaatgaacttacgcatttaccagtgcactccaatggtgagaaacgcgttgttgcgctctccgttacgttgattaatcgccttaaaggtatgttgatactcgacgccgagactgactttgtgcggccaggcgtcgtagtgcgtctcgccggtccagatattccagcggaccccgactccgccaagctgcgcgccctgagtgcctttatcacgatagccgttgtcctgaacgtgagcgtaaggctcaatagtctgtccgttagctaccttctgatgccagctgacgcgataatctgccgtccacgcctgaatatcctggcggatatattgcgccgcatcgaggtacaggttttgggcaaaccagccactaccgttcgggtgccattcgtcgctgtatttgccgccattaaagaaactggcgctggcgcgcagcatggtatcggatgcgccattttggccgttcagcggcaactgctgttcgacggcgatgaaaaagatctgatcgcgcagcggcttccagcgcagaccggtgccggacatcggatttttcaccggcatcatcaccccgttttctccggtatcggcaaagacgcggctataaacactgagcaggtcgccttccagcagcatattgcgtccgatgcggtactcggcttccagttgtccgtagctacgatagcttttccctggcgctgcgccgccgacattattgttagcggtactcattgcgccggaacgcaagccgatggaagaatcgaaactgaacgtccagcggcgaccgacctcctcatgcaaacggcggaaattgaagcgttgttgattttgttctggggtcagtggggttatcagcgcctgattatcaatgtcatcaatcaccagccgggcgtagtgctgcgtcgcaggcatgtcatccagacgctggttcacgtaggccagttgtcggatcagtgccggatcgtccggaagccctttatgcgccggttcgagcatttcccggctctgtgcgatatcaccgctatcccacaaggcgtaaccaagcgctgcctgggtgttgctattattcggttccagttccagcgcggcgcgcaaatcactcaccgcggccgggacattatgacgttggcgataaattgtcgcccgcgcaacgtaagcgttggcagaaggcgcaatattgatactgcgcgtgagatcgttcagtgcgagttccggctgaccaggaatgtaacgttgcgcatgcagccaccagtagagggcattgcttcccagtccacgtttttctgcctgttgtagccagcgatcgcgagccgcaccatttcctgccgcctgggcggtattggcagcagcaagcagatcctcattgctcatgtcgtgaagactgattttctgccaggccgccagtgcggtggcgtagtcctcaacctgatacgcctgataggctaccgcacgatgttgccaggcgctcggttgtcgttgttcggcctgaagccatgcatacaacgccacaccgggtagcgtgtcccgataacactttgccagacggttccaggcggcggcatcgtaggaagggctcatatcgcccagcaagcgaactattgccgggcaattatctgcaatacccggcaactgactttgccactgacgttgctccgccagcggtaagggtttgcttaaaatcgccaccttcgccggcgttgccaggtaaggatgactttccagcagagacgccagtcgcgccattaaagtctggctgacacgcgcatcgccctggaaaggatagcgttgcagcaataaatcggcagcttcgcgactctgctcgttctgcatcagttgccaggttagttgatccaggcgggtaagatttgccggttcttgctgatacagcaatcgtgccagacgcagagcttcagccttgttacgggtcgccacgctgacagcataacgctcctcaagcatttcattggcggggagggtggcgagcagtttttgcgctgcgtcgtactgaccttcttttaacagcaccggtagcgtcgcgccaacaacatactggcggttgtcggcaaactgtaccgtataattcgccaacgcctgaacggggttagcgctgtatttagataacagatagagccaacttttctcttgtgcgtccgtggtaaatagtggcttattttcaatgagataatgctggaggcgtgctttttcgccacgataagccagcgcggtcgcgtaagtaatataactctgaggatcggtgaagatcccctgactttgcagtgccaggatccgatcgtccagctgcccggcaagaagcacgtcaaaccactgacggcgttctgccgcgcttaatgtgttctgctggcgtgcttcattgtatagcgtatctgcctgggaccattgtttcaggtagattgcccgttgcagcagatcggttcgcagcgtttttccttccgggcttgcagcaaacgtcgcatcgttcagttgcgctctggcgacaggtaactgtgccagccgcagggcattctgcccgacttcactgcgacaacgcagggtcggcgcagcatcgcacgctttttgctgggcaagcagttcttcaactgtcgtaacgcttttcacttcaaccggaatagccgccagactgcgctcaagtcgggcatctcctgggtgacgtttcagttgatcctcaagcaacagccgcgcccggtcatcatgaccaaaatggcgataggcttccgcaaggtataaagtcagcggaatattatccggcacctgctggtgtatatattcaaattcgcggatggcggttgcttcgtcgttatttttctgtgccttcagcgctttatcgagacggggataaataacaaaatggcgataatcgctcagccccagctcttctgcgctggtgccgatattgtctgcgagtgcgctggtactcaataaagacgtcagcagtaaaccagaccatccgatgacgcgattaaggttattctccttcattttcggactccagttgcgcaacctgttctgtgtttaaacctgctttgagtaatagactttgcatgctaacttgtaattcgcgttgaattgtcaggacgcgatccaacgtttcctggctgataacgccttcggtgaccaaaaacttgccgagcggcagagaactgcgttcatggcgcaataacaacacgttaattgcactacgattaatatgaccgagcgtggtcagtatttcggcgaacaggaactgatgcggcacatattgccgccagatttcaccggcctgctgttccgtgagccactgatgctgaaccgcattgtacaacattgcccgcggatcgtgaccgcgtcggcgtgcataccagtgacgtaaccctgtgacaatttgtccccgcagaacaatgacgtaacgcactttgcgtccgactttacgcgtcagggccgccaggctaaccgggtcaataccatcttcactgccgacaattaactcgtcattttccagacgcagcggcagtaccgcataatgcagcgccacggaggccggcatttcggcaatcaggctggaagggatctgccaggcatcgatggattcccacgccacgccgttttgctctgccagcgcctgtgccagctgctcggcgctaatcagcccctgcatcagcatactaccgcccaggcgtagaccttcgacgcgattacgcagtgctgtatcgagttgttcttcagtgatgacctgattttccagcagaatttgacctaacgggcgcaagctgcgggtatcgccagtcacgctggggaagtcatgcgttgttttatcccacgccacgcgacgtggatcgccgtgttgaagtacctgttttagcgcgcgccagttggccatgaagttaatcaggttgccccagaaaagacgcaggacggaaagcagcccctgcgtcaggccgtagtagccagtaacgaaaatcacccgctgcacgatgcggttaaccatcaaaccaaagtttagccacagcagggtcattaaccatgcgctgccgctgaaaatagaaaggaaatgccaggcatcgggccacaaactttcatacgccagcaacagcaaaagctggatcatcaccagcatcgcgaggaagctgacaaagttactgattgcccctttgcggtcgcgccagagaaagtagttcagcgtcaggctggaggtccatttatgggttttaaagccttggaaaacaatgccgatgatccagcgggatttttgtcgaaccgcagtgctaaaggtatcggggaaatattcgcgcacgcagatcatgttacttgtccgcgcgtgctgtaaaaatttacgctgctcgcgttctttggcttcgtccaccaccggaaaacggacaaaaatttccgtcatacctttttctttcaggcggaagccaatgtcgtaatcttcagtaagactctgcacgtcgaaagcaataccgtcaccgtcagctaacagtgcggtcacggcgcggcggctgaaacaggtgccgacgcctgcgctgggcacttgtccggcgagggcttcacgcaccggaacatctttgccatgcagctcactaaactcatcaatgtaagtcatgctggtgaagtgcgtccattcgcgttcgaacggatacaccgggatctgaatcagatctttacgctcgaccagatagttgaacagacgcaattccatcggactaatcacatcttcggcgtcatgcagaataaaaccagcaaaagcgaaattggcgctacgctcaaattgggtgatggcgtccagcacgttgttcagacagtcggctttgctggtggggccaggacgcgcgcagactaccttatgcacattcgggaagcgagcgcacacttcgtcaacatcacgctgagtatcggggtcgttggggtaggtgccaacaaagatatgatagttttcgtagtcgagcgtggtcgccgccagctcggccatattgccgatgacgcccgtttcattccacgccggaaccataatcgctaacggtttttcatctggtttatacagttcgcggtaactcattcgcgggtagcggcgataaacactcaacttgcgtttaatgcggcgtacccagtagacgacatcaataaaaaaatcgtccagcccgctgatgaacatgatgaccgctaacgttatcgcgattacttttaagccgtagagccaggtagcaaaaacatcaagaagccagtccacacaaaaaccttacattaacgctggttatgtttagggtggcgtatattaaggttttttatgaattgtgacagctttttaccattaataggtatgactattgcggcacgttatttttacactggttataaaagttgccgtttgctgaaggattaagcgggtaatgtgataacaaaccttgtcccccgcgcatcgctcgttaccgcaaccgtgcctttatgcgcgacaacaatgcttttcactatcgccaggccaataccgctaccttcaccttttcgctggcgggaggggtcaacgcgatagaaacggtcaaacaatcgcggtaagtgctcgggcgcaatgggcgtaccggggttttcgacgataacttgcaccaggtgatcgaccgtctgacagcgcactacaattgtctctccggttggcgtataacgcagggcgttgctaagcaggttgcttagcgcccgacgcagcatcagcggatcgcccgcgacctgacacttgtcgccaacaaaccgcaactccacgccgcgatcttccgctaacgcctcgaaaaaatcgaacactttgccgacttcatccgccaggttgagcattttcttttcggggattagctggttgttatcggcctgagcgagaaacagcatatcgctgaccattttcgccattcgcgtcagctcttcgagattagagtagagcacatcttccagctccttctggctgcggctctggctgagggcgatttcggtttgcgttatgagattcgtaattggtgtgcgaatttcgtgagcgatatccgcactgaaattggactggcgggtaaagacatcctcaatacgctcgatcatatggttgaagctcagtaccagctgttccagctcaatgggcacggtctgcgggtcgaggcgaacgtcgagatctttgctggtaatattctggatttgacggctgacgctgcggatcggcgcgtgacctttatgtaccgccaacagtacgataaagacgatcaggatgctgattacgcttgcggtcataataagtttattcatcaaatcatttatgtaatgaagatgaaaatcgatgctaagcgcgatgtagagcgtataaatcggtttgccgtccaccaacgggccaaccggcaagttaatcatccgccagttgctgtgttccatatgcccgtgaccgtggcctggcatcatcatcgtcgggccggaaaggagatacacctcgccaccctgagcgtctttatcgggtatggcgtcacgcgtaaactcgcggatatccggcgcaccgggggagtgatacaccgttttaccctgactatctgccagggaaatcaacacattggaataaccactgacgatatcttccagcgtcattaagcgtcgggcttgcgtttcgtcagggtgatttagtacccgttcaagggtggcgctaatctcttttaaatcattaatatcctgctcggcaaaatgaacttttacactgtggatcatgatccatgcaaaggcgaaaaacgccgcgatggtggccaggctgataaaaaaggtcaggcgggttgccaggctaaacgggcgctgaaatggcttactgaccatccggcacctcaagcatgtaacccacgccgcgcacggtctgaattagcttcggctcaaagtcgttgtcgattttgccgcgcagccgcttcaccgccacatcaatagcattggtatcgctgtcaaaattcatgtcccatacctggctggcgataaggctgcggggcagcacttcgccctgatggcgaaggaagaactccagcagagtaaactctttactggtcaaagtgatgcgcgtgccgctgcgggtgactttgcggctgacgagatcgaccatcaaatcggcaacctgaaactgactttcgataatcaccgccgccccgcgccgcagtaatgtgcgcacccgcgccagcagttcagcaaaagcgaatggcttcaccaggtagtcatctgcccccaactccagccccttgacgcgatgttcaatggtgccaagcgcggtaagcaacagaatcggcatccctttattggcggagcgtaacatgcgcacgatatcccagccgttcacgtccggcagcataatatcgaggattatcagatcataatcaccggtcatcgccagatggtagccattcagcccgttgtcggccaaatcgaccacaaaaccggcttcggttaaccctttggtcaagtattctccggttttcttttcatcttcgacaatcaacagtttcatatttcctccgcatgttgcccgggcaattctagagtagcgggatcagatggcaatcgcttattggcaaaatgacaattttgtcatttttctgtcaccggaaaatcagagcctggcgagtaaagttggcggcataaaatcaccagaaattatgagcctatgtctccttgtaaacttctgccattttgtgtggcccttgcgctaaccggttgtagtctggcaccggattatcagcgtccggcaatgcccgtgccgcagcagttcagtctcagccagaacggcctggttaacgcagcagataactatcagaacgcgggctggcgcaccttttttgttgataatcaggtgaagacgctgattagcgaggcgctggtgaataatcgggatttgcgcatggcgacgctgaaagtgcaggaggcacgggcgcaatatcgtctgaccgatgccgaccgctacccacagctcaatggcgagggcagcggcagctggagcggtaatcttaaagggaataccgccacgacacgggagtttagcaccggccttaacgccagctttgacctcgattttttcggtcgcttaaagaacatgagcgaagccgagcgacaaaattatttagccactgaggaagctcagcgcgcggtgcatattctgctggtttctaatgtcgcgcaaagctatttcaatcagcaactggcgtatgcgcaattgcaaatagccgaagaaacgctgcgtaattatcagcagagttatgcgtttgtcgaaaaacaactgttgacaggtagcagtaatgttctggcgctggaacaggctcgcggggtgatagaaagtacccgcagcgacatcgctaaacgtcagggggaactggcgcaggcgaataatgcattgcaactgttgctgggaagctacggcaagctgccgcaagcgcagacagtaaacagcgacagcctgcaaagcgttaaattaccggcgggattgagcagccaaatcttattgcagcgcccggatattatggaagctgaacacgcgttaatggcggctaatgccaatattggcgctgcacgcgcggcattttttccgtctataagcctgaccagcggaataagcaccgccagtagcgatctaagcagtttatttaacgccagcagcgggatgtggaattttatacccaaaattgagatccccatttttaatgccggacgcaaccaggccaatctggatatcgccgaaattcgccagcagcagagcgtggtgaattatgaacagaaaatccagaacgcctttaaagaagtggcagatgcgctggcattacgtcaaagcctgaacgatcaaattagcgcccagcagcgttatctggcaagcctgcaaattactttgcaacgggcgcgggcattatatcagcacggcgcagtaagttatctggaagtgctggatgccgagcgttctttatttgcaacccgacaaactttacttgatctgaattatgcccgtcaggttaacgaaatttctttgtataccgcacttggtggcggttgacagcaatatactcgtcatacttcaagttgcatgtgctgcgtctgcgttcgctcaccccagtcacttacttatgtaagctcctggggattcactcgcttgtcgccttcctgcaactcgaattatttagagtatgacttttaactccaggagagaataaatgaaaaaagcactgcaagtcgcaatgttcagtctgtttaccgttattggctttaatgcccaggctaacgaacatcatcatgaaaccatgagcgaagcacaaccacaggttattagcgccactggcgtggtaaagggtatcgatctggaaagcaaaaaaatcaccatccatcacgatccgattgctgccgtgaactggccggagatgaccatgcgctttaccatcaccccgcagacgaaaatgagtgaaattaaaaccggcgacaaagtggcgtttaattttgtccagcagggcaacctttctttattacaggatattaaagtcagccagtaacccaggtttaatgagatgaaaaaaatcgcgcttattatcggcagcatgatcgcgggcggtattatttctgcggcaggttttacctgggttgcaaaggcggaaccgcctgcagaaaaaacgagcaccgcagaacgtaaaatcttattctggtacgacccaatgtatcccaatacgcggttcgataaaccaggtaaaagcccgtttatggatatggatctggtgccgaaatatgccgatgaagagagttctgcgtctggtgtgcgcattgacccgactcagacgcagaatctgggggtgaaaacggctaccgtcacgcgcggaccgctgacttttgcccagagtttcccggcgaatgtcagttacaacgagtatcagtatgccattgtgcaggctcgcgctgccgggtttatcgacaaggtgtatccgcttaccgtgggcgataaagtacaaaagggcacaccgcttctcgacctgaccattcctgactgggtggaagcgcagagtgagtatttactgctgcgcgaaaccggcggtacggcgacccagactgaaggcattcttgagcggctgcgactggcgggaatgccggaggcggatattcgccgcctgatcgccacgcaaaaaatccagactcgctttacgctcaaagcgcccattgatggcgtgatcaccgcgtttgatctgcgcgcgggaatgaatatcgccaaagataacgtggtagcgaaaattcagggtatggacccggtgtgggtcactgctgcgatcccggagtctatcgcctggctggtgaaagatgccagccagtttaccctcaccgttccggcgcgaccggataaaacactcaccatccgcaaatggacgctgctacctggcgtggatgccgcgacccgcacgctgcagctgcgtctggaagtcgacaacgccgacgaggcgctaaaaccgggcatgaacgcctggttgcaactcaacaccgccagcgaaccgatgctgctcattccgagtcaagcgctgattgataccggcagcgaacagcgggtgattaccgttgatgccgacgggcgctttgtaccgaaacgcgttgctgttttccaggcaagccaaggcgtcaccgcattacgctctggtctggcggaaggtgaaaaggtggtttccagcggcctgttcctgattgattccgaagccaatatttctggcgcactggagcggatgcgctctgaaagtgcgacccatgcgcattgagggaataaccaatgattgaatggattattcgtcgcagcgtggcgaaccgttttttggtgctgatgggcgcgttgtttctgagcatctggggcacctggaccatcattaatacgccagtggatgcgctgccggatctctccgatgtgcaggttattattaaaaccagctatcccggtcaggcaccacaaatcgttgaaaatcaggtgacttatccgctaaccaccaccatgttgagcgtgcctggcgcgaagactgtgcgcggtttcagtcagtttggcgactcttatgtgtatgtcattttcgaagatggcaccgatccgtactgggcgcgtagccgggtgctggagtacctcaaccaggtacagggtaagctgcctgcgggagtcagcgccgagctggggccagatgccacgggtgttggctggatctatgaatatgcactggtggatcgcagcggtaagcacgatctggccgatttacgcagtttacaggactggtttctcaaatatgagctgaaaaccatccctgacgttgcggaagtggcgagcgtgggcggtgtggtgaaagagtatcaggtggttatcgatccccagcgcctggcgcagtatggcatcagtctcgccgaagtaaaaagcgcgctggatgctagtaaccaggaagcgggcggtagcagcatcgaactggcggaagcggaatatatggtgcgcgccagcggctatctgcaaacgctcgacgactttaatcacatcgctttaaaagccagtgaaaatggcgtgcccgtttatctgcgcgatgttgcgaaggtccagattggcccggagatgcgccggggcattgccgaactaaacggcgaaggcgaagtggcgggcggggtggtgatcctgcgatccggcaaaaacgcccgagaagtgatcgccgccgtgaaggacaaactggaaacgctgaaaagtagtctgccggaaggcgtggagatagttacaacatacgatcgcagccagctcattgaccgcgccatcgacaacctcagcggcaagttgctggaagagtttattgtggtggcggtagtctgtgcgctgtttctctggcatgtgcgcagcgcgctggtggcgattattagcttgccgctggggttgtgtattgcttttattgtcatgcacttccagggactgaatgccaatattatgagcttgggtggcattgcgattgccgtcggggcgatggtcgatgctgctatcgtcatgatcgagaatgcgcataaacggctggaagagtggcagcaccagcatcctgacgccacgctggataataaaacgcgctggcaggtgatcaccgatgcgtctgttgaagtggggccggcgctatttatcagtctgctgattatcacgttgagctttatcccgatcttcaccctggaagggcaggaagggcgtctgtttggcccgttggcgttcaccaaaacgtatgcgatggcgggtgcggcgctgctggcgatcgtagtgatcccgatcctgatgggctactggatccgtggcaaaattccgccggaaagcagtaacccgctcaatcgctttttgattcgtgtttatcatccgctgttgctgaaagtactgcactggccgaaaaccacgctgctggtggcggcgcttagcgtgctgacggttctctggccgctcaataaagttggcggggaatttttaccgcagatcaatgaaggcgacttgttgtatatgccaagcacgctgccggggatttccgcagcagaggcggcgagtatgctgcaaaaaaccgacaagctaattatgagcgtacctgaagtggcgcgggtatttggcaaaaccgggaaagcggaaaccgccaccgattctgctccgctggagatggtagaaacgaccatccagcttaagccgcaggagcagtggcggccaggcatgacgatggacaaaatcattgaggaactggataacaccgtgcggctgccggggctggcgaatctgtgggtgccgccaattcgtaaccgtatcgatatgctcagtaccggcattaaaagccccatcggcattaaagtttccggcactgtgctggcggatatcgacgcgatggctgagcaaattgaagaagtagcgcgaacggtgccaggcgtagcttctgcgcttgccgagcggctggaaggtgggcgctatatcaacgttgagattaaccgtgaaaaagccgcacgttacggtatgacggtggcggatgtgcagttgtttgtgacttctgcggtgggcggggcgatggttggcgaaacggtggaagggattgcccgttatccaattaatctgcgttatccgcaaagctggcgcgatagtccgcaggcactgcgccagctgccgatcctgacgccgatgaagcagcaaatcaccctggcagacgtggccgacattaaagtctctaccggaccgagcatgctgaaaaccgagaatgcgcgcccgacgagctggatttatatcgatgcccgcgatcgtgacatggtgagcgtggttcacgatttgcaaaaagcgatagctgaaaaagtgcagttaaaaccgggcaccagcgtggcattctccgggcagttcgagctactggagcgcgccaaccataagcttaaactcatggtgccgatgacgttgatgattatcttcgtgctgttgtatctggcgttccgtcgggtgggcgaagcgttgctgattatcagcagcgtaccgtttgcgctggtgggcggcatctggttgctgtggtggatgggctttcatctttccgtggcgacgggcactggctttatcgccctcgccggggtcgccgccgaatttggcgtggtgatgctgatgtatttacgtcacgccatagaggccgtgccgagcttgaataatccacaaacattcagcgagcagaagctggatgaggcgttatatcacggcgcggtcctgcgcgtgcgcccgaaagcgatgacggtggcggtgattatcgccggtctgctgccgattctgtggggaacgggggctggtagtgaggtgatgagccggattgccgcgccgatgattggcggcatgatcaccgcacctttgctgagcctgtttattatcccggcggcgtataagctgatgtggctgcaccgacatcgggtacggaaataaaagcaggataccccgtttaaccgtgtggattgtgtcttgcgacgatgggcactaaatgttaaaaggtgcccctcaacaaaaaagacacacaggggaaaggcgtgaaaaacgcgagtaccgtaagcgaagatactgcgagcaatcaagagccgacgcttcatcgcggattacataaccgtcatattcaactgattgcgttgggtggcgcaattggtactggtctgtttcttggcattggcccggcgattcagatggcgggtccggctgtattgctgggctacggcgtcgccgggatcatcgctttcctgattatgcgccagcttggcgaaatggtggttgaggagccggtatccggtagttttgcccactttgcctataaatactggggaccgtttgcgggcttcctctctggctggaactactgggtaatgttcgtgctggtgggaatggcagagctgaccgctgcgggcatctatatgcagtactggttcccggatgttccaacgtggatttgggctgccgccttctttattatcatcaacgccgttaacctggtgaacgtgcgcttatatggcgaaaccgagttctggtttgcgttgattaaagtgctggcaatcatcggtatgatcggctttggcctgtggctgctgttttctggtcacggcggcgagaaagccagtatcgacaacctctggcgctacggtggtttcttcgccaccggctggaatgggctgattttgagcctggcggtaattatgttctccttcggcggtctggagctgattgggattactgccgctgaagcgcgcgatccggaaaaaagcattccaaaagcggtaaatcaggtggtgtatcgcatcctgctgttttacatcggtagtctggtggttttactggcgctctatccgtgggtggaagtgaaatccaacagtagcccgtttgtgatgattttccataatctcgacagcaacgtggtagcttctgcgctgaacttcgtcattctggtagcaagcctgagtgtgtataacagcggggtttactctaacagccgcatgctgtttggcctttctgtgcagggtaatgcgccgaagtttttgactcgcgtcagccgtcgcggtgtgccgattaacagcctgatgctttccggagcgatcactagcctggtggtgttaatcaactatctgctgccgcaaaaagcgtttggtctgctgatggcgctggtggtagcaacgctgctgttgaactggattatgatctgtctggcgcatctgcgttttcgtgcagcgatgcgacgtcaggggcgtgaaacacagtttaaggcgctgctctatccgttcggcaactatctctgcattgccttcctcggcatgattttgctgctgatgtgcacgatggatgatatgcgcttgagtgcgatcctgctgccggtgtggattgtattcctgtttatggcatttaaaacgctgcgtcggaaataaggcattcacgctacatccgacaaaacgatgtcaaccatccgaaaccgctctcatccattcgatgagagcggtttttttaattactgcttaaatgcacccgccagagagcgaatatcattgccggttggcgagtaatccccgcatatccggttgtcaggtcaggatggtaaggcacctgctttacactttcgcccgtggtcagtgatggctgcgggcgaatcgtaccagatgttgtcaattaatcgtgttggcacagcgttatgactatcttttcttttatctgccagtgcacagcaaacatctcattctcacgatgaatgatgacctgctgtttattccagctaattatctgatagtccagaaaacctgcatcagtttggatctcacttgccttaaatgcgctctctttggcggaaaatgccagtgtcagcgccagagaaaaggctaaaccgcagtctgcgagtcgctcgtgttccgctggtgtaataatgttgtctgtcaattctcttgcggtttgtacagaaaaaatttcttctatatcaatgccaatcggttgacgagataccacggctaatgccgtagtcccacagtggctaatactgccgtatacctccgcaggccagacaggttggcgtagctcgccgattgcgggcacacatttatagccatattcccgcaaagcataaacagcagcgatccgtccggctaaatgctctgttttacgtttacgtccagcgtgttgcagttgtgcgtagtgcggcagccagagtaaatcctgttcacaaaaattcgccggatcgaactcaacaaaatgcagcgtatgtccggcaaaggggagggaggtatgcgtagttttcatatcgaccatattcgagactgatgacaaacgcaaaactgcctgatgcgctacgcttatcaggcctacatggtcctgcaatatattgaattggcaagatttttgtaggccggataaggcgttcacgccgcatccggcatgaacgacgcgcactttgtcaacaatctgacgttagcatcagaagtgggtgtttacgctcatataccacgtacgtcccggctcgttataggtatacgccccggcaccggcgatatagttggcccctgccgaatcgcccgtggtctgggcattacccgcacgccacaaacgtttgtcgaacagattgtccacgccgccggtcagactgacattcttcgtcacatcccaggtcgcgctcaggccaacaatgctgtaaggactaatttctttggtttccggtccaaccgctggctgacctttatagttgtacttcttcggctgctgcttgccgtaccaggtgaaggtcgtttgcatgctcaaatcttcccgtgcctgccagctcagcgtactgttcaacgtatactccgggatgatgctcaaacggtcgcccgtggttttgttttcactcttcagcatataagtgatgttattggtccacatcaccgtttcgctaaccggtacgtttaagcttccttccagaccttcaaccaccgctttcggcacgttatcccactgatagagatcggtgccgactgcgttttgccctacagccacatagcccgcttcaatcttattgcgataatcgttacggaaccaggtgacgcccgccagccacccgtcgcgtttgaactccagaccaatctctttgttgatgctggtttctgctttcaggtcatcgttaccttgcagatagcagccgcccgcgctggcatagcaaccctgacctttactgtagagaatgtagttcgggttagtctggtacaggctcggcgctttataagcacgggcgatgcccattttcagcgtgaagtcatcgcctaaaccttggcttatgttcagcgccgggctccagttattgccgacaatactgtgatgatcgaaacgcagccccggcgttacgatggtgctgtcagtcagctccatgttgttttcggcaaacaggctgaaaatttctgctttactatacgggctacggtcggtggtactcacgccatcaatagcgccaccggtattcgttccggtcagtgcctgggtgttggaacttaagtccttcatccgttgctgattccactccgtacccagcgtcagcgtctggttaacgaggaaatcaatcggcaggttaacttcgctgtgcagcatcacgtcatcaagatcgatatcgacgaaatcctgtgtcgctttttcgttaaatttcccttcggtaccgcccgccagaccttccggaatacggctgttacgggtgtgttcgtactgcacccagttgctggtggtcacgccgttatcccagccaccgttccaggtcagcgcgtagttctggcgatacagacggttggtttcatcgccatatttgctgcgggtataggaatcggagttggtattctgggtgtcgcccgcatacaggttaccctggcggctgtaacctgcttccagttccaggctttgcaatggcgcgaaatcccagcgcaccacgccattaatatctttgttgattaccccttcgcgcccggctggtaacgtcgtggcatacgttccggcacgcgcggactgatggccctggttgatatcccacgcgtcagcctgggttttgtcgaggttgccatacaaacggaagctgaattcgtcgcccagcggaccggtcaggctaaagttagtgcgtttggtggcaccttcctctttatgttctggcgcattgaaatatgcgtcccaggagccgtgccactcgccgctgccttttttggtaatgatgttaaccacgccgcccgccgcgccgttgccataacgcgcagctgccggaccacgcagaacttcaatacgttcaatcatttcaggtggcacccaggaagtatcaccacgggtatcgcgctcgccacgccagccctgacgcacgctgttacggctgcttaccggcttgccgtcaatcaaaatcagcgtgttttccggacccataccgcgaatatcaatctgtcggttattcccacgctgaccactggtggagttaccggtcaggttaacgcctggcatggtacggatgatcttgctcacatcgcgggcaaccgggtttttgcggatttcatctgcggtgatggtgctaacgccaggcgcctgtaagttctgctcggcggcggtaacgacaatagtatcgtcatgactaacaggagtatcggtcggctcttgtgcctgcgctaccccataaatccccagattgaccaacaaggccagggaatgaatcttcttgttcattgttttattcctgcatttttgccacgaattgcaactgtcgggcatggtcgtcatcaacacgacgcatcccgctaccgcgaaaacctttgatcctgaaagacacgcagtgcagttggttaattaatgtccgcgcttcccacggcgcgccattacgctattgcaaatgcaaatagttatcaataatattatcaatatatttctgcaatcaatgaaaaattgcacagtaaacatggggttatggtgtgacggcgttaaaagtaggaagtgagagctggtggcagtcgaaacatggcccggaatggcagcgtctgaatgacgaaatgtttgaggtcactttctggtggcgtgatccccaaggttctgaagaatacagcacgataaagcgcgtatgggtctacatcactggtgtgaccgatcaccatcagaacagccagccccagagcatgcagcgaattgcaggcactaacgtctggcagtggacgacacaactcaatgccaactggcgcggcagctactgctttattcccaccgaacgcgatgacattttttctgtaccatcccccgatcgcctcgaattgcgcgaaggctggcgaaaactattaccccaggcgatagccgatccgctgaacctacaaagctggaaaggcgggcgagggcacgctgtttctgcactcgaaatgccgcaagcgcctctgcaaccgggatgggattgtccgcaagcgccagaaatacctgccaaagaaattatctggaaaagtgaacggttgaaaaagagtcggcgtgtatggatttttaccaccggcgatgcaacagcagaagaacgcccgctggcagttttgctcgatggcgaattttgggcgcaaagtatgcccgtctggccagtgctgactagcctgacccatcgtcagcaacttcctcccgccgtgtatgtgttgatcgacgctatcgacaccacgcaccgcgcccacgaactgccgtgtaatgcggatttctggctcgcagtacagcaagagttattacccctggtgaaagctattgccccttttagcgatcgtgccgatcgcaccgtggttgccgggcagagttttggtgggctttccgcgctgtatgccggactgcactggcctgaacgctttggctgtgtattaagccagagtggaagctactggtggccgcatcggggcgggcagcaagagggcgtgttacttgaaaagctaaaagctggtgaagttagcgccgaaggtctgcgcattgtgctggaagcgggtattcgcgagccgatgatcatgcgggccaatcaggcgctgtatgcgcaattacaccccataaaagaatccattttctggcgtcaggttgacggcggacatgatgcgctttgttggcgcggtggcttgatgcaggggctaatcgacctctggcaaccacttttccatgacaggagttgaatatggcattcagtaatcccttcgatgatccgcagggagcgttttacatattgcgcaatgcgcaggggtaattcagtctgtggccgcaacaatgcgtcttaccggcaggctgggacattgtgtgtcagccgcagagtcaggcgtcctgccagcagtggctggaagcccactggcgtactctgacaccgacgaattttacccagttgcagaaggcacaatgagccagcatttacctttggtcgccgcacagcccggcatctggatggcagaaaaactgagtgaattaccctccgcctggagcgtggcgcattacgttgagttaaccggagaggttgatagcccattactggcccgcgcggtggttgccggactagcgcaagcagatacgctgcggatgcgttttacggaagataacggcgaagtctggcagtgggtcgatgatgcgctgacgttcgaactgccagaaattatcgacctacgaaccaacattgatccgcacggtactgcgcaggcattaatgcaggcggatttgcaacaagatctgcgcgtcgatagcggtaaaccactggtctttcatcagctgatacaggtggcggataaccgctggtactggtatcagcgttatcaccatttgctggtcgatggctttagtttcccggccattacccgccagatcgccaatatttactgcacatggctgcgtggcgaaccaacgcctgctagcccatttacgcctttcgctgatgtagtggaagagtaccagcaataccgcgaaagcgaagcctggcagcgtgatgcggcattctgggcagaacagcgtcgtcaactgccgccgcccgcgagtctttctccggcacctttaccggggcgcagcgccagcgcagatattctgcgcctgaaactggaatttaccgacggggaattccgccagctggctacgcaacttagtggtgtgcagcgtaccgatttagcccttgcgctggcagccttgtggctggggcgattgtgcaatcgtatggactacgccgccggatttatctttatgcgtcgactgggcagcgcggcgctgacggctaccggacccgtgctcaacgttttgccgttgggtattcacattgcggcgcaagaaacgctgccggaactggcaacccgactggcagcacaactgaaaaaaatgcgtcgtcatcaacgttacgatgccgaacaaattgtccgtgacagcgggcgagcggcaggtgatgaaccgctgtttggtccggtactcaatatcaaggtatttgattaccaactggatattcctgatgttcaggcgcaaacccataccctggcaaccggtccggttaatgaccttgaactggccctgttcccggatgtacacggtgatttgagtattgagatcctcgccaataaacagcgttacgatgagccaacgttaatccagcatgctgaacgcctgaaaatgctgattgcccagttcgccgcggatccggcgctgttgtgcggcgatgtcgatattatgctgccaggtgagtatgcgcagctggcgcagctcaacgccactcaggttgagattccagaaaccacgcttagcgcgctggtggcagaacaagcggcaaaaacaccggatgctccggcgctggcagatgcgcgttacctgttcagctatcgggaaatgcgcgagcaggtggtggcgctggcgaatctgctgcgtgagcgcggcgttaaaccaggggacagcgtggcggtggcactaccgcgcagcgtctttttgaccctggcactccatgcgatagttgaagctggagcggcctggctaccgctggataccggctatccggacgatcgcctgaaaatgatgctggaagatgcgcgtccgagcctgttaattaccaccgacgatcaactgccgcgctttagcgatgttcccaatttaacaagcctttgctataacgccccgcttacaccgcagggcagtgcgccgctgcaacttagtcaaccgcatcacacggcttatatcatctttacctctggctccaccggcaggccgaaaggggtaatggtcgggcagacggctatcgtcaaccgcctgctttggatgcaaaatcattatccgcttacaggcgaagatgtcgttgcccaaaaaacgccgtgcagttttgatgtcagcgtgtgggagtttttctggccgtttatcgcaggggcaaaactggtgatggctgaaccggaagcgcaccgcgacccgctcgctatgcagcaattctttgccgaatatggcgtaacgaccacgcactttgtgccgagcatgctggcggcatttgttgccagcctgacgccgcaaaccgctcgccagagttgcgcgacgttgaaacaggttttctgtagtggtgaggccttaccggctgatttatgccgcgaatggcaacagttaactggcgcgccgttgcataatctatatggcccgacggaagcggcggtagatgtcagctggtatccggcttttggcgaggaactggcacaggtgcgcggcagcagtgtgccgattggttatccggtatggaatacgggtctgcgtattcttgatgcgatgatgcatccggtgccgccgggtgtggcgggtgatctctatctcactggcattcaactggcgcagggctatctcggacgccccgatctgaccgccagccgctttattgccgatccttttgccccaggtgaacggatgtaccgtaccggagacgttgcccgctggctggataacggcgcggtggagtacctcgggcgcagtgatgatcagctaaaaattcgcgggcagcgtatcgaactgggcgaaatcgatcgcgtgatgcaggcgctgccggatgtcgaacaagccgttacccacgcctgtgtgattaaccaggcggctgccaccggtggtgatgcgcgtcaattggtgggctatctggtgagccaaagcggcctgccgttggataccagcgcattgcaggcgcagcttcgtgaaacattgccaccacatatggtaccggtggttctgctgcaacttccacagttaccacttagcgccaacggcaagctggatcgcaaagccttaccgttgcctgaactgaaggcacaagcgccagggcgtgcgccgaaagcgggcagtgaaacgattatcgccgcggcattcagcagcttgctggggtgtgacgtgcaggatgccgatgctgatttcttcgcgcttggcggtcatagcctactggcaatgaaactggcagcgcagttaagtcggcaggttgcccgccaggtgacgccggggcaagtgatggtcgcgagtactgtcgccaaactggcaacgattattgatgctgaagaagacagcacccggcgtatgggattcgaaaccattctgccgttgcgtgaaggtaatggcccgacgctgttttgtttccatcctgcgtccggttttgcctggcagttcagcgtgctcagccgttatctcgatccacaatggagcattatcggcattcagagtccgcgccccaatggccccatgcagacggcggcaaacctggatgaagtctgcgaagcgcatctggcaacgttacttgaacaacaaccgcatggcccttattacctgctggggtattcccttggcggtacgctggcgcagggtattgcggcgcgactgcgtgcccgtggcgaacaggtggcatttcttggcttgctggatacctggccgccagaaacgcaaaactggcaggaaaaagaagctaatggtctggacccggaagtgctggcggagattaaccgcgaacgcgaggccttcctggcagcacagcagggaagtactagtacggagttgtttaccaccattgaaggcaactacgctgatgctgtgcgcctgctgacgactgctcatagcgtaccgtttgacggtaaagcgacgctgtttgttgctgaacgcacacttcaggaaggtatgagtcccgaacgcgcctggagcccgtggatagcggagctggatatctatcgtcaggattgtgcgcatgtggatattatctctccagggacgtttgaaaaaattgggccgattattcgcgcaacgctaaacaggtaaattaatattatttataaacccataattacagaaaataattatgggttttttatttgtttgatttataggtttgatgaatatttctcttaaatagagtgaatgttgcattcagtggaaggaatttacaaacttcagcttcggataattatcaccaactggtaaagtgagcgccgtggagatttccccctattggactcattttcaggttataccccatgagtagtctgaatattaaacagggaagtgacgctcattttcccgattatcctctggcgagccccagtaataatgaaattgatttacttaatctaatcagtgttttatggcgggccaaaaaaacggtcatggcggtcgtttttgcgtttgcctgcgcaggcttgctgatctctttcatcctgccgcaaaaatggaccagcgcggcggttgtcacgcctccagaacctgttcagtggcaagagttggagaaaagtttcactaagcttcgtgtgctggatctggatatcaaaattgatcgtacagaagcatttaacctgtttatcaagaagtttcagagcgttagcttgctggaagagtacctgcgtagtagtccttatgtgatggaccaattaaaagaggcgaaaatcgacgaactggatttgcatcgcgcaattgtcgcattgagcgaaaaaatgaaagcggttgatgacaatgccagtaagaaaaaagatgaaccgagtctgtatacctcctggacgctaagttttaccgcgccaaccagtgaagaggcgcagaccgttttgagcgggtatatcgattatatctctacgttggtggtgaaagagagcctagaaaacgtccgtaataaactggagatcaaaacccagtttgaaaaagaaaaactggctcaggatcgcattaaaacgaaaaatcaacttgatgcaaacattcagcgcctcaattatagtctcgacattgccaacgcggcaggaattaaaaagcccgtttacagtaatggtcaggccgttaaagatgaccccgatttttctatttctctcggtgcagacggtattgaacgcaaactggaaatagaaaaagcggtcactgacgttgcggaactgaacggtgaattacgtaatcggcagtatcttgtcgagcaattaacaaaagcacatgtcaacgatgtgaattttacgccgtttaaatatcagttaagcccgagtttgccagtgaaaaaagacggtccgggtaaggcgattattgtgatcctttccgcgttgatcggcgggatggtggcttgtggtggcgtgctgttgcgctatgcgatggcatccagaaaacaggatgccatgatggcagaccacttagtttaactatttgcggtactaggtgccgttcgtccgagcggcaccacaagcggcgttccggcaactggatcgtcaatgatcatgcagcgcagaccataaatgcgctcaatcagttcagcagtgacaatctccttcggcgctccctgagcaacaattttcccttcccgcaatgcaatcaaatggctggcgtaacgacaggcctgattaagatcgtgcagcaccgccgccagggtatagcctttttcgcggttcagttcgcttaacaactccagcaaatcaatctgatgactgatatccagccaggtcgtgggttcgtcgagcagcataattgccgtttcctgggccagcaccatcgcgatccacgctcgctggcgttgtccgccagaaagggtatccacgctttgatctgccagatgagttattcccgtggcctgcattgctttcgttaccgcttcttcatcctctttgcgccagcgggtaaacagcggttgatgcggataacgtccacgcgccaccagctcctgcacggtgatatcgcccggcgtggtagcattttgcgccaacagaccaatccggcgtgcaacctctttactggcgtaatgttgaatgtgctcgccatccagccagacatgcccatgagcaggcgtcatcaggcggcttaaggtacgcagtaacgtggatttaccgcagccatttggcccgataattgccgtgaagtgaccatcaggtatttctacagtcagattttccgcaacggtatatttgccatatcccagggttaactgttcgccgcgcaaacgggctacactttcggtcattttttgcgagactcctgaattaacaagacgataaggtaaataccgccgaggctgacggtaacgacgccaaccggaagttgatacggcataaacagttgttgggcgcagagatcggccgccagcagtaacagcgccccgcatagcgccgcctgggttagcccccagcgagcggtgccgctaatgcgtcgggcaatgtgcggtgcgactaaagcaataaaggaaatcggcccggcaagcgctgttgccgcagcggtaagcaccactgcaaccagcatcattaacagacggctacgttcgacgctgacgcccagcgcacacgcggtatcatcgcccatttccagcaagcgcatccggcgtaccagtaaggcggcggcaatgagcatcaatataatgatgggtgcggaagggctggtttttgcccacgtcaggccgttgaggcttccggcattccacaaacctgctgttagcgccgtttctaaagacgctttcagcaacagccaggtattaaaggccaccagcatggcgcgaacgccgataccgataataatcaaccgaaaggtgtcgatgccgttgcgccaggcgagcagccagaccagcaggctagtgacaatgccgcccaccattgcactcagcgcgatagccgtcaggtcctgaccaaacagcaccatcgccaccagcacgccgctccacgccccggtgttaaagcccattacgtcagggctgccgagcgggttacgcatcaggctctgaaaaatcgcgccactgacgcccagtgctgcgccaatcaacagcgccatcagcacgcgtggtaaacgccattcggtgaccaccatcgtcatactgcgcggcgcatcgcccatcagcgcggcgaatacctggctggtttccagcgtgacggcaccgctgcgtaatccccagatacctgcaaccacacaggcggaaaccagcagcaaacaggtgatgagtaatcggcgagagacgtaaatcatgcaccacctcgcgttttacgtcgcacgaggaagatcagcaccggtgcaccaataaacgcactgaccacagaaacgcgcagttcgccgggcacaatcacccgcccgatgatatcggcaaacagcagcagggcaggggtagcaagtagcgtgacgggcaggctccagcgatgatcggcacccaccagccaacgcgccatatgcggcatcatcaggccaataaaggcaatcgggccaactattgccgtcgcactaccacaaagcacggtaatcgccagcagaccaatcaactgtgtgcgcgccacgcgactgcccagcgccgtcgcggtgtcgctgccgaggctcaaactgttcagcgcgcgactcagtaatagcgcagttgctccggcgatcagcaccgggatcagcaccacttttaaggtatgtagattgcgaatatccaggctaccggcttgccagaaacgcaactgatcgtagacgtcaggattaagcagggcgatgccgctggtcagtccttccagcaccgccgccagcgccacgcccgccagggttaaacgcaccggacttaactgcccgccgccctgactgccggtaaaggcaacaatcaaactggccaccagcgccccggcgaaggccatcgccagttgttcctgcgcggaagagtaaccaaacagcgccgcacccagcacaatggcaaagctggctccggcgttcacgccaagcaagccggggtcggcaagtgggtttcgggtgagggtttgcattaacgccccggcaaggccaagcgcgccgcctgccagtaaaccggcaagggtacgcggcagccgcgcgtcgagcacgatggtgcagtcggcgctctggcaggtgccggagaaggcctccagcactacggaagcggggagactttttgccccaatgagcaggcttaatgccgtcgcgataatcagtaataacagcaatccgggcacggcaatggcgcgtgtcacggcaacagaaccagacatacgaacttccatgataatgaaattaattatcgttatcgatcttatttggatatgttagcatgtgcagcctaagaataggtatttaaaatatttgatggcaaggcattgtaatgaataaacaatcctggctgcttaacctcagcctgttgaaaacgcacccggcgtttcgcgcagtattcctcgctcgtttcatcagtattgtgtctctgggtttgctcggcgtcgcggtgccggtgcagatccagatgatgacacattccacctggcaggtggggcttagcgtgacgctgaccggcggcgcgatgtttgttggcctgatggtcggcggtgtgctggcggatcgctatgagcgcaaaaaagtgattttgctggcgcgcggcacctgtggcattggcttcattggactgtgccttaatgcactgctgccggagccgagtttgctggcaatctatttacttggtttatgggatggttttttcgcaagccttggcgttacggcgctattggcggcgacaccagcactggtagggcgtgaaaacttaatgcaggccggggcgatcaccatgttgaccgtgcgtctggggagcgtgattagccccatgattggcggtttattgctggcgaccggtggcgtagcctggaactacgggctggcggcggcgggcacgtttattaccttgctaccgttgttaagccttccggcgttgccaccgccaccgcagccgcgtgagcatccgttgaaaagtttactggcaggatttcgttttctgcttgccagcccgctggtgggcgggattgcgctgctgggtggtttattgacgatggcgagcgcggtgcgggtactgtatccggcgctggctgacaactggcagatgagtgcggcacagattggttttctctacgcggcgatcccgctcggcgcggctattggtgcgttaaccagcgggaagctggcacatagtgcgcgaccagggttattgatgctgctctccacgctgggaagcttcctcgccattggtctgtttggcctgatgccgatgtggattttaggcgtggtttgtctggcgctgttcggctggttgagtgcggtcagcagcttgctgcaatacacaatgctgcaaacgcaaaccccggaagcgatgttagggcggattaacggtttgtggacggcgcagaacgtgacgggcgatgccataggcgcggcgctgctgggtggtttgggcgcgatgatgacaccggttgcttccgcaagcgcgagcggttttggtttgttgattatcggcgtgttgttattgctggtgctggtggagttgcgacattttcgccagacgccgccgcaggtgacagcgtccgacagttaatgcttaaaacagcgccttaagcctatccagcacttgcatggcgctgtagtaatccagacggaacgtctcggttcccagcgcataaacctgcttgttttgtactgcaggcaggtgcgcgagcagcggattagcataaatagcatcggcatctttctgatcaccggcgaacaggaatagactctcgccatttaaccctgcagccagattttccccaccaagctgaatgatgtcatggcgtttaccctgactttggctggcatttaaccctgcgggtaacttcgccagcgtaaagccgagttgttccagcatctgcccttgtgcactttctggcgtccagagattggcactgtgtgcagcggcagtatagacaatggcagtgaccggctgcggcggtaatttgatttgctctttcgccgccgccagttgcttatcaaactgcgcaatccgctctgccgcttgtttctcatgcccggtaatttcgccaagttgcgttaacaggctctgccagcttttgtcgtcgtaattgatgattaatgtcggggcgatggtggaaagctgatcatacagtgccagcgcgctatccccgccggttgcgctaattaaaatcagatccggcatttgcgcggcaacggcttcggcgctcggttcgccgatatagagccgttgcagtttgcgttctttcgccaccttgctccactggcgtaaaaagccctggtcatccgcgacgcggttattcggcgtggtcgcgccgctggcgatcaccggagcatcaatcgccagcagactgccggtcagggtgacgctggtggaaacaatacgctgcggctggctttccagtgtatgtgtgccacggctgtcagtaatctgacgcggccagtcagcggcctgaactgcggctattccactaagcaaaagtcctgttaatagaagggcgttgcggtagagcggggcgagtctcacaaatcagcttcctgttattaataaggttaagggcgtaatgacaaattcgacaaagcgcacaatccgtcccctcgcccctttggggagagggttagggtgaggggaacagccagcactggtgcgaacattaaccctcaccccagccctcaccctggaagggagagggggcagaacggcgcaggacatcacattgcgcttatgcgaatccatcaataatgcttctcattttcattgtaaccacaaccagatgcaaccccgagttgcagattgcgttacctcaagagttgacatagtgcgcgtttgcttttaggttagcgaccgaaaatataaatgataatcattattaaagcctttatcattttgtggaggatgatatggatacgagtctggctgaggaagtacagcagaccatggcaacacttgcgcccaatcgctttttctttatgagcccgtaccgcagttttacgacgagtggatgtttcgcccgcttcgatgaaccggctgtgaacggggatagccccgacagtcccttccagcaaaaactcgccgcgctgtttgccgatgccaaagcgcagggcatcaaaaatccggtgatggtcggggcgattcccttcgatccacgtcagcctagcagcctgtatattcctgaatcctggcagagcttctcccgtcaggaaaaacaagcttccgcacgccgtttcacccgcagccagagcctgaatgtggtggaacgccaggcaattccggagcaaaccacgtttgaacagatggttgcccgcgccgccgcacttaccgccacgccgcaggtcgacaaagtggtgttgagtcggttgattgatatcaccactgacgccgccattgatagtggcgtattgctggaacggttgattgcgcaaaacccggttagttacaacttccatgttccgctggctgatggtggcgtcctgctgggggccagcccggaactgctgctacgtaaagacggcgagcgttttagctccattccgttagccggttccgcgcgtcgtcagccggatgaagtgctcgatcgcgaagcaggtaatcgtctgctggcgagtgaaaaagatcgccatgaacatgaactggtgactcaggcgatgaaagaggtactgcgcgaacgcagtagtgagttacacgttccttcttctccacagctgatcaccacgccgacgctgtggcatctcgcaactccctttgaaggtaaagcgaatagccaagaaaacgcactgactctggcctgtctgctgcatccgacccccgcgctgagcggtttcccgcatcaggccgcgacccaggttattgctgaactggaaccgttcgaccgcgaactgtttggcggcattgtgggttggtgtgacagcgaaggtaacggcgaatgggtggtgaccatccgctgcgcgaagctgcgggaaaatcaggtgcgtctgtttgccggagcggggattgtgcctgcgagcagtccgttgggtgagtggcgcgaaacaggcgtcaaactttctaccatgttgaacgtttttggattgcattaaggagcgaggatgagcattccattcacccgctggccggaagagtttgcccgtcgctatcgggaaaaaggctactggcaggatttgccgctgaccgacattctgacgcgacatgctgcgagtgacagcatcgcggttatcgacggcgagcgacagttgagttatcgggagctgaatcaggcggcggataacctcgcgtgtagtttacgccgtcagggcattaaacctggtgaaaccgcgctggtacaactgggtaacgtcgctgaattgtatattacctttttcgcgctgctgaaactgggcgttgcgccggtgctggcgttgttcagccatcagcgtagtgaactgaacgcctatgccagccagattgaacccgcattgctgattgccgatcgccaacatgcgctgtttagcggggatgatttcctcaatactttcgtcacagaacattcctccattcgcgtggtgcaactgctcaacgacagcggtgagcataacttgcaggatgcgattaaccatccggctgaggattttactgccacgccaagtcctgctgatgaagtggcctatttccagctttccggtggcaccaccggcacaccgaaactgatcccgcgcactcataacgactactactacagcgtgcgtcgtagcgtcgagatttgtcagttcacacaacagacacgctacctgtgcgcgatcccggcggctcataactacgccatgagtagcccaggaagcctgggcgtctttcttgccggaggaacggttgttctggcggccgatcccagcgccacgctctgtttcccattgattgaaaaacatcaggttaacgttaccgcgctggtgccacccgcagtcagcctgtggttgcaggcgctgatcgaaggcgaaagccgggcgcagcttgccagcctgaaactgttacaggtcggcggcgcacgtctttctgccacccttgcggcgcgtattcccgctgagattggctgtcagttgcagcaggtgtttggcatggcggaagggctggtgaactacacccgacttgatgatagcgcggagaaaattatccatacccagggttacccaatgtgtccggatgacgaagtatgggttgccgatgccgaaggaaatccactgccgcaaggggaagtcggacgcctgatgacgcgcgggccgtacaccttccgcggctattacaaaagtccacagcacaatgccagcgcctttgatgccaacggtttttactgttccggcgatctgatctctattgatccagagggttacatcaccgtgcaggggcgcgagaaagatcagattaaccgtggcggcgagaagatcgctgccgaagagatcgaaaacctgctgctgcgccacccggcggtgatctacgccgcactggtgagcatggaagatgagctgatgggcgaaaaaagctgcgcttatctggtggtaaaagagccgctgcgcgcggtgcaggtgcgtcgtttcctgcgtgaacagggtattgccgaatttaaattaccggatcgcgtggagtgtgtggatagtcttccgctgacggcggtcgggaaagtcgataaaaaacaattacgtcagtggctggcgagtcgcgcaagtgcctgaaggagagaacacgatggctattccaaaattacaggcttacgcactgccggagtctcacgatattccgcagaataaagttgactgggcctttgaaccgcaacgtgccgcgttgttaatccatgatatgcaggactattttgtcagcttctggggcgagaactgcccgatgatggagcaggtgatcgcgaatattgctgcgctgcgcgactactgcaaacagcacaatatcccggtttattacaccgcccagccgaaagagcagagcgatgaagatcgggcgctgttgaatgatatgtgggggccgggcctgacccgcagcccggaacagcaaaaggtggtggatcgcctgacgccagatgccgacgacacggtgctggtgaagtggcgctacagcgcgtttcatcgttctccgctggagcaaatgctgaaagagagtggacgtaaccagctgattattaccggggtatatgcccacattggctgtatgaccaccgcaaccgacgcatttatgcgcgatattaaaccgtttatggtggcggatgcgctggccgatttcagccgtgacgagcatttgatgagcctgaaatatgtggccggacgttctggccgggtggtgatgactgaagaattactgccagcacctatccccgccagcaaagcggcgctgcgtgaggtgatcctgccgttgctggacgagtccgatgaaccgttcgatgacgacaacctgatcgactacggtctggatagcgtgcgcatgatggcgctggcggcgcgctggcgcaaagtgcatggtgatatcgactttgtcatgctggcgaaaaacccgaccatcgacgcctggtggaagctactctcccgcgaggtgaaataatggatttcagcggtaaaaatgtctgggtaaccggcgcaggtaaaggtatcggctacgccacggcgctggcgtttgttgaggcgggagcgaaagttacaggttttgatcaagcgttcactcaggagcaatatccctttgcgaccgaagtgatggatgttgccgacgctgcgcaggtcgcgcaagtgtgtcagcgactgttagctgaaacggagcgactggacgcgctggtcaatgcggcgggaattttacgcatgggcgcgaccgatcagctcagtaaagaggactggcagcagacttttgcggttaacgtcggcggtgcgtttaacctgttccagcaaaccatgaaccagtttcgccgtcagcggggcggggcgattgtcactgtggcgtccgacgccgcgcacacgccgcgtattggcatgagtgcttatggcgcaagcaaagcggcgctgaaaagcctggcgttgagcgtcgggctggaactggcgggtagcggcgtgcgctgtaatgtggttagccctggctccaccgacaccgatatgcaacgcacgctgtgggtgagcgatgacgccgaagaacagcgtattcgcggctttggcgagcagtttaaactcggcattccgctggggaaaatcgcccgtccacaagagatcgccaacacgattttgttcctcgcctctgacctcgccagccatattaccctacaggatattgtggtcgatggcggcagtacgctgggggcataagcatgatctggaaacgccatttaacgctcgacgaactgaacgccaccagcgataacacaatggtggcgcatctgggaattgtgtatacccgtctgggcgatgatgtgctggaagccgaaatgccggttgatacccgtactcatcagccgttcggtttactacatggcggcgcgagcgcggcgctggcggaaacgctgggaagcatggccggatttatgatgacccgcgacggacagtgtgtggtaggcacagaacttaatgcaacacaccatcgcccggtgtctgagggaaaggtacgcggcgtctgccagccgctgcatcttggtcggcaaaatcagagctgggaaatcgtcgttttcgatgaacaggggcggcgttgctgcacttgtcggctgggtacggcagttttgggatgaacccgacagaattagatgagattgcaggaaaactcggttaacggagtgatcgagttaacattgttaagttaaatattggtttcaactccgatttacatggttgctgtgttgttaaattgtacaaagatgttatagaaacaaaatgtaacatctctatggacacgcacacggataacaactatgaacaaaagtgggaaatacctcgtctggacagtgctctctgtaatgggagcatttgctctgggatacattgctttaaatcgtggggaacagatcaacgcgctgtggattgtggtggcgagcgtctgtatctatctgatcgcttaccgtttttatgggctgtatatcgccaaaaatgtgctggcggttgacccgacgcgtatgacgccagcggtgcgccataacgacgggctggactatgtgccgacggacaagaaagtgctgttcggtcaccattttgcggccattgccggagcaggtccgctggtggggccggtactggcggcgcaaatgggctacctgccggggatgatctggctgctcgctggggtggttctcgccggtgcggtgcaggatttcatggtgctgtttgtttctacgcgccgtgacggtcgcagcctgggtgagctggtcaaagaagagatggggccaaccgccggggtgattgcgctggtggcctgctttatgatcatggtcattatccttgcagtgctggcgatgatcgtggtgaaagccctgactcatagcccgtggggaacatataccgttgcgttcaccattccgctggcgctgtttatggggatctacctgcgctatctgcgtccggggcgtattggcgaagtgagcgtcatcggtctggtattcctgattttcgccattatctctggcggctgggtggcagaaagtccgacctgggcaccgtactttgactttaccggcgtgcagttgacctggatgctggtgggttacggttttgtggcggcggtgctgccggtgtggttactgctggccccgcgtgactacctctctaccttcctgaaaatcgggactatcgtcggtctggcggtaggcattttgattatgcgcccgacgctgaccatgcctgcgctgaccaaatttgtcgatggcactggcccggtatggaccggtaacctgttcccgttcctgtttatcaccatcgcctgtggcgcggtgtctggcttccatgcgctgatctcttctgggaccacgccgaagatgctggcgaacgaagggcaggcgtgctttatcggctacggtgggatgttaatggaatccttcgtggcgattatggcgctggtttccgcctgtatcatcgatccgggcgtgtattttgccatgaacagcccgatggcggtgctggctccggcagggacggcggatgtggtcgcttctgccgcgcaggtggtgagtagctggggctttagcattacaccagatacgctaaaccagattgccagcgaagtgggtgaacagagcatcatttcccgtgcgggcggtgcgccgacgctggcggtggggatggcctacattctgcacggcgcgctgggcggcatgatggatgtggcgttctggtatcacttcgccattttgtttgaagcactgtttattctgacggcggtggatgcaggtacgcgtgctgcgcgctttatgttgcaggatctgctgggcgtggtgtctcctggcctgaagcggaccgatagtctgcctgctaacctgctggcaacagcgctgtgcgtactggcgtggggctacttcctccatcagggcgtggtcgatccgctgggcggcattaacactctgtggccgctgtttggtattgccaaccagatgctggcagggatggcgctgatgctctgtgccgtggtgttgttcaagatgaaacgtcaacgttacgcctgggtggcgctggtaccaacggcctggctgctgatttgtaccctgaccgcaggctggcagaaagcgtttagcccggatgcgaaagtcggcttcctggccattgctaataagttccaggcaatgatcgacagcggcaatattccgagccagtatactgagagtcagctggcgcaactggtgttcaacaaccgtctggatgccgggttaaccatcttctttatggtggtcgtggtggttctggcactgttcagcattaagacggcacttgcggcattgaaagatccgaagccaacggcgaaagaaacgccgtatgaaccaatgccggaaaatgtcgaggagatcgtggcgcaggcaaaaggcgcacactaaagtcagagtgagggggggatgttggcgaatgttggcttagtgcccagggttccctctcaccctaaccctctccccggtggggcgaggggactgaccgagcgcgttgatagcatttgtaggccggataaggcgttcacgccgcatccggcactctttcagcaacatggttagcggaggccaagatgtttgatagtctggcaaaagccggaaaatatttaggtcaggcggcgaagctgatgattggtatgcctgattacgacaactatgtcgaacatatgcgggttaaccatcccgatcaaacgccgatgacctacgaagagtttttccgtgagcggcaggacgcgcgctacggtggaaaaggcggcgcgcgctgctgctaaatttgtacgtcaggctttaaagctttccacttttttgaacgctgcacgcaacgtatctggtgtcagcgtgactggcaggtaatgaatggactccaccggacgcagggtgtgggcaatcactttgtcgatctccgcctgattattgatatccacttccagctccgccagtgtagtcggcagatgaaaacgctgatacgctccagttaattgcgccagcacatcatcctgacccagcaaggcgctttgcaccagaattccgtaggcgactttggtgccgtggagaaacttctcggtttgcggcagcacggtcagaccgttatgcacggcatgagctgccgccacacgcgtaaaacgatcgcccagaccaccaaccatcccaccaccagcaataatagcatccaccacatcgcaaaaactttgcgttaactgttgattttgctgatcgctcagcgcctgttcgctactgtttaacaagacgtcgcgaatggcttgcgcattattgatccccagtcgcacggttagcggcaacgtttctggttgcggagccagcaccaccgcttcataccatttcgccagcgtgtcaccgatccccgccagcagatattgttgcggtgcattgaggataatctccggttccaccagcaccataaaattggcgtcgtcgaaaatctcataatgcagcgcctgtccggcatcattataccagacggagagcggtgtccaggcggcgcaggtggcggcgatcgtcggaacggcaacaaacggcagaccgagacggcgggcgagggctttcgcggtgtcgagcagtgcaccgccaccgacgccaatcaccacgctgcggtcgtcaccggactcagccgccagttgttgtacatcgctttcgctgcaatgaccgcgaaacaaaatatgctttgcccctggcagtccaaacgctggcggaagtttggtttgcgccgcagcaatggcgcgtttgccgtagatccacaccgcgcgagaaagttgttcatcagtgaaaaaatcgtgcaggtgattgaaacttcctggatgactaaagtagttagccgggccgacgaccacgcggataggattgtgaggcatgttgtgttgtccttattgttttatttagacatctaaacgtcttgattgccaaatactagcatcgtgttatagtgccttcaacacgcaacttcgtcaggtacaataaaaatgacaaataaccctctgattccacaaagcaaacttccacaacttggcaccactattttcacccagatgagcgcgctggcgcagcaacaccaggcgattaacctgagccaaggctttcctgattttgatggtccgcgctatttacaggagcggctggcgcaccacgttgcacagggggcaaaccaatacgcgcccatgaccggcgtgcaggccttgcgcgaggcgattgctcagaaaacggaacgtttgtatggctatcaaccagatgccgatagcgatatcaccgtaacggcaggggcgacggaagcgttatacgcggcgattaccgcactggtgcgcaatggcgatgaagtgatttgttttgatcccagctatgacagttacgcccccgccatcgcgctttctgggggaatagtgaagcgtatggcactgcaaccaccgcattttcgcgttgactggcaggaatttgccgcattattaagcgagcgcaccagactggtgatcctcaacactccgcataaccccagtgcaactgtctggcagcaggctgatttcgccgctttgtggcaggcgatcgccgggcacgagatttttgtcattagcgatgaagtctacgagcacatcaactttagtcaacagggccatgccagtgtgctggcgcatccgcagctgcgtgagcgggcagtggcggtttctagttttggcaagacctatcatatgaccggctggaaagtgggttattgtgttgcgccagcgcccatcagcgccgaaattcgcaaggtacatcagtatctgacctttagcgtgaataccccggcacagctggcgcttgctgatatgctacgtgcagaacctgagcattatcttgcgttaccggacttttatcgccagaagcgcgatattctggtgaatgctttaaatgaaagccggctggagattttaccgtgtgaaggtacatactttttgctggtggattacagcgcggtttctaccctggatgatgttgagttttgccagtggctgacgcaggagcacggcgtagcggcgattccgctgagcgtgttttgcgccgatcccttcccacataaactgattcgtctctgttttgccaagaaggaaagcacgttgctggcagcagctgaacgcctgcgccagctttaattatttaaccgtccaggcgcgggaatattgacggtcggcaaacaactcttgcaggccgttaatttgcttcaggcgcagcacttcgtcgctgtccattcccagctctttgccaattttattatcgtcccatcccaactggctaagttcacggacgatttcgctcatggcggtgatttgatggcgtccacgagcgcgattatgacgaatagtcgcggcgatgcgttgattacgcgtaccttccagacaggtcaccggcaaataaccttttaagcgtaattttaaactactactgcctttaccaatttcatggcggtgaaaaccatccacgatttccatggcatttttatccgtatgtgtgaccacaatgggttgggtaaaaccatctatttcaatggatttttgcagcagttttttttcgggtggtgccacgttgtttgggttgtaatcattaggcataagttggctgtttttaacccacagaacgcaatccactggctcttcacgaaaggggctaacctgatggatcgccatgcggatttcattaatcgctttgatgcgatcatcttccggcaagctggcgagaaattgcgttaaatcctgcgttaatcgttgttgcatagtatcccccattcctgacgttttccttttatccgttcgttataacgctgatagttcttgctttttgtggggctaaaacttaatgcccgacaccagtaatcgttattgagtaaaactttgcatatccgccgccaggaggggatatctttcgcgccaatgtccccttgctgggtttgtggaacctcgatgccttttttctgataccagtgcaaataaatggcgattttattgcggtaatgctcagctgttttttccggcatgctattgagcagcaataatgcatattcttgccagtctaaatgttctggcttgaggattttccgatgcccatagaaatgattgtcatgtccggcgtaaatgccgccactttttaccccgctgactcgtgcgcacatagcagcccagcgatccggttcgataacgtgatagagccataatccttgtcgttgctccgggccaaaaggttcgcaaattcgcatatgacgcagaggaacgcctgcctgatacattaggttatacagtgggttgcagagactttgatgatttgcataccaggtccagatatcagccactttccagtcgtaaatggggtaaatgtaccagctatgaccgcctggtgcggccgtagtccagggtttatcgtcggcaaaacgttgtttatttaaactggcgatggcgacaaaacggttgtaggactcatccgcacggatgccgatcatcatcgccgccggacgtttttgactaaaccattcggcaaactcacgtacaaattgttcgaaggtcatgcctggctggtaaaagcagaaaaagtcagggtcggttatcgcatcttggggaggttgacgtacccattcgacatcaggttcccagcactgccattcgggttggtattgactaagggaattttgcgtcgtaagcgggagcgcaacccagtaaaactcttcgatgacatcggtgtacaactcgcgcagggactgaacatagttaatggtgcaagagaattgcgcctcccagtcgataaacaaaacgcagatttttttgcccatttgtcgggcaagttcggctgtcagatgcagcattaaaccagagtctttgccgccagaaaaactgacacaaacgcggggtagggtgttgagtgtccaggtaatacgctctcgtgcagcttccagaatattgagcggaagaggaattttataaatagacatctgaagacgctctctgaacgttacagggtgatcagtgagataagtctgttaattataaagtaaacactgtaaagcagagtgttttatttttcattcgcgctgtgaataaatagatgaaagttatagtagctgtctgtagttatatatcaaaaactctcatttagacggtcaataaatcgggagaacaccaaattatttaaagaagatttattataggaaatgtaaagctttatactaggtaacggatgttctagttttatctcttttaagttaagaaagtcacggtaggaattataaagttcataggggactattcccagtaaatctgtaactgcaatgctattaatgattgtcagcaaagaggaaccacgaaaactgattttgcgattcataaatctctcgtctatttccatttgaatatcatcaacccctgcacttttagatattaattgggtgaactcttctgccataatttgttcataagtgctattgtcagtaattcgtggatgcctattactacaaattagagtattgcgaatcgtatgcaatggcatgcaaatgacggaacggctgatcactggcatttgggtgatcaccagatcggctttgcggtgaaccaacagttcttcagcattctctgcactcatgaggatatcatggcactcaatctcgacagaggaatcttgccgtaggcagcggatcagcatactattattagagcaagaaatgagctgagggccgtagataataaagtttttctttagttcggacttattgactatattaattgtttgttcaaggcctctgagatttttctcaagatggtgatgcagatttaaccctgttgtcgtcggcgcgataccttttccactgcgaatgaataaagggtcattaaattgcgcacgtaagcgttgtaagctctggctcacggcacttggggtgatatatagactttcagcagctttgctaatgcttaaatgctggtaaatacactcaaatatgacaagaagatttaagtcgaactttttcaagtcgtagagattggccatacactactccggttatatttttcttccatgatatattcacttaatcaatgttttttgcgtatatatttttattgattatgtttttttgcttaactcaggattaagtttttctaaaatagcacagccacttagggcagagcgagcaattcatgcttttttaggatggttgaaaagcagggatatagttcaaccatccatgaattaccttttatttattccccataatgatattaagcgttttctgatcgggcaaccccacggcctgttgtagcgtattttccttactcatgtaatagatagccggcgtgacatttgcccccagatcgtccatcagtttctcattgtcacttaacactttcatttgctctgtacttacgtttgcaggcacgtttagcttaagcttgccaccagaggcttcatattgttgccaggtttttgcgggatctttggaggcaagaattgccgctgctgtcgccgggctttctggcttgataaccccaaccaacaatgttcttaattgcactttgccagaatctacccacgggcgcgcctgctgccagaactgtttacaatatgggcagaacggatcggcgaagacgtagacaatgaccggcgcatcttttttaccgtcgaggagccagtgggattgttccatccgttgccacatttcgcgtccggctggtgcgtaaatttctttttcgataagtgtgttactcaggttttcacctttctcgttgtacatgtaaccagagatagcgtgcttaccatctggagtcaggtagatggtgacgcccatatcctgacactttccgagataacctttcattcctccgggggcatcgaatgttttgatgattgtaatgccctgtttttcaatcgcttttactggagcaggaagttcctctgcgaaggcgattgcaggaagcagagccagtaaaagtatcttttttaacattaatttgtccttttcagtcagtgcaaaagtcgagtaaaaggcataacctatcactgtcataggtaagagcttagatcaggtgattgccctttgtttatgagggtgttgtaatccatgtcgttgttgcatttgtaagggcaacacctcagcctgcaggcaggcactgaagataccaaagggtagttcagattacacggtcacctggaaagggggccattttactttttatcgccgctggcggtgcaaagttcacaaagttgtcttacgaaggttgtaaggtaaaacttatcgatttgataatggaaacgcattagccgaatcggcaaaaattggttaccttacatctcatcgaaaacacggaggaagtatagatgtccttgattaacaccaaaattaaaccttttaaaaaccaggcattcaaaaacggcgaattcatcgaaatcaccgaaaaagataccgaaggccgctggagcgtcttcttcttctacccggctgactttactttcgtatgcccgaccgaactgggtgacgttgctgaccactacgaagaactgcagaaactgggcgtagacgtatacgcagtatctaccgatactcacttcacccacaaagcatggcacagcagctctgaaaccatcgctaaaatcaaatatgcgatgatcggcgacccgactggcgccctgacccgtaacttcgacaacatgcgtgaagatgaaggtctggctgaccgtgcgaccttcgttgttgacccgcagggtatcatccaggcaatcgaagttaccgctgaaggcattggccgtgacgcgtctgacctgctgcgtaaaatcaaagcagcacagtacgtagcttctcacccaggtgaagtttgcccggctaaatggaaagaaggtgaagcaactctggctccgtctctggacctggttggtaaaatctaaatttccttcgtctttcacgccatagcggcgttggcgtcgcccgctcaccccggtcacttacttgtgtaagctcccggggattcacaggctagccgccttgctctgacgcgaaatacttcggaaattcacctaattcttcgggtgctgcggcacccgattttcttccccgcaccatgatgcaagctgcatccaggtagccgcagaggccgcttgcatgatgatgtttaaagcccaggagataaacatgctcgacacaaatatgaaaactcaactcaaggcttaccttgagaaattgaccaagcctgttgagttaattgccacgctggatgacagcgctaaaagcgcagaaatcaaggaactgttggctgaaatcgcagaactgagtgacaaagtcacctttaaagaagataacagcttgccggtgcgtaagccgtctttcctgatcaccaacccaggttccaaccaggggccacgttttgcaggctccccgctgggccacgagttcaccagcctggtactggcgttgctgtggaccggtggtcatccgagcaaagaagcgcagtctctgctggagcagattcgccatattgacggtgattttgaattcgaaacctattacagcctctcttgccacaactgcccggacgtggtgcaggcgctgaacctgatgagcgtactgaacccgcgcatcaagcacactgcaattgacggcggcaccttccagaacgaaatcaccgatcgcaacgtgatgggcgttccggcagtgttcgtaaacgggaaagagtttggtcagggccgcatgacgttgactgaaatcgttgccaaaattgatactggcgcggaaaaacgtgcggcagaagagctgaacaagcgtgatgcttatgacgtattaatcgtcggttccggcccggcgggtgcagcggcagcaatttactccgcacgtaaaggcatccgtaccggtctgatgggcgaacgttttggtggtcagatcctcgataccgttgatatcgaaaactacatttctgtaccgaagactgaagggcagaagctggcaggcgcactgaaagttcacgttgatgaatacgacgttgatgtgatcgacagccagagcgccagcaaactgatcccagcagcagttgaaggtggtctgcatcagattgaaacagcttctggcgcggtactgaaagcacgcagcattatcgtggcgaccggtgcaaaatggcgcaacatgaacgttccgggcgaagatcagtatcgcaccaaaggcgtgacctactgcccgcactgcgacggcccgctgtttaaaggtaaacgcgtagcggttatcggcggcggtaactccggcgtggaagcggcaattgacctggcgggtatcgttgagcacgtaacgctgctggaatttgcgccagaaatgaaagccgaccaggttctgcaggacaaactgcgcagcctgaaaaacgtcgacattattctgaatgcgcaaaccacggaagtgaaaggcgacggcagcaaagtcgttggtctggaatatcgagatcgtgtcagcggcgatattcacaacatcgaactggccggtattttcgtccagattggtctgctgccgaacaccaactggctcgaaggcgcagtcgaacgtaaccgcatgggcgagattatcattgatgcgaaatgcgaaaccaacgtgaaaggcgtgttcgcagcgggtgactgtacgacggttccgtacaagcagatcatcatcgccactggcgaaggtgccaaagcctctctgagtgcttttgactacctgattcgcaccaaaactgcataagaagaagtaagattcacctgcaattgcttagccgccggggtcaaacctggcggcttttttatggcattaaaaagccccgccgggatggctccgggcagggcgggatacttattctggcaattaacgcacaaccagcaccggcagattggcgtggcggatcacgctgctggcgttagaacctaacagatgggtgctaatgcttgggttgcgagaaccaataactacaacatcagcccccagttcttctgccaactcattgacttcatcccgcacgctaccaaaacggacatgttgtttaatgcgggaaggatcgatggtgaagtggctgaccatcgtttgcagacgttcttgtgcttcatgttgcagatgctcttcaaaacgacgcacatcagcggcaaaacggtgcaggctcaggctggcactcccgggtagtacgtgaagtagatgaataactccgtcatcctgggcgaggaattcagcgtggcgaacagctttgtcgctcaattccatttcaaatacatcaactggcataatgattgtcttatacataaccctttctccctgttaatcatgaacaaatcattcgccatgattataatatttatccctgatatttgtctggttctttttccttacgaactgtttctgtgatgaatatattctcactgaacaccaggaattctcccaaaacctgtggtaccgcccgttttcccgctgtgatagctacccttaaagactgactcttttttgaactgtctctggaggttgcatgaaagcattgacttatcacggcccacatcacgttcaggtagaaaatgttcccgatccgggcgttgaacaggcagatgatattattctgcgtattacggcaacggcgatctgtggctctgacctccatctttatcgaggcaaaatacctcaggttaaacatggcgatatttttggtcatgaatttatgggggaagtagttgaaaccggaaaggacgtaaaaaatttgcaaaaaggcgaccgagtggtaattccgttcgtcattgcttgtggcgactgttttttctgtcgattgcaacaatatgccgcctgcgaaaataccaatgcgggtaaaggcgctgcgctcaataaaaaacagataccagctccagcggcattgtttggttatagtcacctgtatggcggcgttcctggtgggcaggcggaatatgtccgcgtccctaaagggaatgtggggccgtttaaagtaccgcctttgcttagtgatgataaagcgcttttcctttctgatattctgccaacggcatggcaggcagcaaaaaatgcgcagatccaacaaggtagtagcgttgcagtctatggtgctggtcctgtgggattgttgacaatcgcctgtgcacggttgctcggtgcggaacagatttttgttgttgatcatcatccctaccgcttgcatttcgccgccgaccgctacggcgcgatcccgattaattttgatgaagacagcgatccggcacagagtattattgaacaaacggcaggtcaccggggcgtggatgcagtaatagacgccgtcggttttgaagcgaaaggcagcaccacggaaacggtgctgactaacctgaaactggagggcagcagcggtaaagcgttgcgtcagtgtattgcggcggtcaggcgtggcggcattgttagcgtaccgggcgtctacgctggatttattcacggtttcctgtttggcgacgcctttgataaagggttgagctttaaaatgggacagacccacgttcacgcatggctgggagaattattaccgttaattgagaaaggattactgaaaccagaagaaattgttacccactatatgccgtttgaagaggccgcccggggatatgagattttcgaaaaacgtgaagaggagtgccgtaaggtgattctggtacccggtgcacaaagcgcagaggcggcgcagaaggcggttagtggtctggtgaatgcgatgccggggggaacaatatgatcgtcaggagtggttttcgaggtaaaggacagccatgacgataatcgccgccataatcagaaatcctatcaggatgtaaaatgcttctgccatggttattcccacaaacgaaacggaataattttgcagcaaaagtgaacagtgagaaccaggaaaaattgctgattttgcgtaaagaggatgcgagtgcatcctctgggcaaagcgagttatcgcttgtgcagatgggattaaagcaggtagtcgccagcagcttctggctggtattcgagttccagcacttcaaggtgggttgcaacgccgcccggaagttcccagtgaatggaatcgccaacgcgcagccccagcagtgcggcacctaccggagccataacggaaagctgagtattgctatcggtcatttttgccggatacaccagcgtgcgcacacgcacttcgccatcgctaagattgcggaatttaacccggctgttcattgtcaccacgtcgtgtggcatctcttctgggctacacatttgggcgcgatccaactctgcgtttaacgcgtcggcgattggcaaaccagcataggcgggttgctccagcagaatatcgatgcgttcggcatccaggtcgttaatgatgatagttggtctggacatttttactccatgtcgtcggtgctgcgagtgtcgcagataaacatacccaaaagaaaaccctcaccgtcaggcggcgagggtttaactcacatgatgatactgactgttgctcactctttgaagtgatttgcgtcacattcagggaattcctcaatgcagcgcattatgtataaatcttaatcgccttggtttatggaagacgaattagcgtgttttgtaaatcagatgattaataacccgctttatcaatcacaaaggttttgccacagttacctgggtgaggttgtggcaagaaactgtttgcagaaagcggagcgttgatggcgtcagctttgatgctgatctgaatttcagtcaaatacgcagggttaccctggcacgttagcttaactgctttcacgttctcttttccccagcttttggcaaaggcggcgtcaaagtcacggcggctcactgttttaccgtaattatccgcaaggaattttccggcttcgctctctttaatttcttgattcaggcgtaccatcgtaccgaagtatgcgtccggatcaaaaccaaagcaggcaccgtgtttggcatattcgtagcgttccaggcaggaacgtccgccagctcctggcatgacttcacttagtttagcggccgtttccagacttaatccggtttccgggctactacacattcggctggcgcgcgcttctggtagattcgggattgggcgagtagcgcaaccgaagcgcatccagcggcgttcatcaacaccacgggcagcaacgcttttaggcaatcctggccacagaccatgtacggtcagaaaatcagctttgttggtcgtttcggtttgcaggcgacattcatctcgttcgttacgatttcgatcgtgttgactctggcaaaatccggtttgccaggagagggccaggacatagcgatcaaaatcgccatactgttttgcctgcaacgctaaggcgttggcagaagagaagggaagcagagaaaccgcgagcaacgcggcgttacgccagaatgctttcataatgggtgtggaactcatacatacactgaatactatctattaaatcataaaaaagcccgccaggtgggcttacctggcgggcgtgatgatttattcagcgtttggcgaacgtattagttccacatggcgagaatcggccagccaaccaacagcaacatagagatgtaaatcaccccgaagattgcgccaagacgccagtaatctttacttttcacatagccacagccgtaaataatcaccccaggaccggttgcatacggcgtcagacagcccatgataccgatagacagcaccagcaggatacacagttgttccattggtacgcccggaatacctttaccgacggccagaataaccggcagcatggttgcggtgtgcgcagacaggctggcaaacaggtagtgtgcaaagtagaacaccagaaccagtacaatcaccgttgcgtttggactgaatccttccaggtgcgtactcatggtaccggcgaaccagtcaataaaaccagaacgagtcaggccgttagccatcacaaccagagttgccaggttgaccagtgtgttccatgcgctgttatagcgggtaatgtctttccaaggcacaacgtgcagggccagcattaggctaactgccagcagaccaaccgcagtagcattaatgacttcactgccaaatacccacaaacctaagctgagcaatacaaggccaatcagtgtccactctctgcgtgtcagcgcacccatggttttcagttcatcacccgcccaggttgccacttcttcactgtgtgtgatttccggtttgtacagcacgtaggaaagccacggcgcaatgataagcaagataaccccaaccggcaggaagcagaggaaccactgcaaccagctaatctggataccggcaattttgctgacgaactccagacccagcacgtttggtgccgcaccggtgacaaacatggagctactcagactggtactaatgaccatcatccacatcaaatagccgccaatacgacgcgcggacggatcgttcgggaaacttttaaacaacggcggcaggtttttaatgaccggaaaaaccgtacccccggtacgcgcggtgttggaaggtgtaaacggtgccagcagaatgtcgataatgacaatcgcataacccaacgtcagcgtgcgtttgcccatgaatttcaccaggaaaagggcaatgcgacgacctaacccggaaacttcataccctaatgcaaaaataaatgcgccaaataccagccataccgtggtgctggaaaaaccagccaggccccatttcagcgcctgtttttgcgcattaaacgctgggtcagctaattctttggcatcaaagagcaggtaattactgccaataacgcaaatagtaaccgcaataaaactgatcgctgttgccggaattggctcgaggatcatgccgacaatcattgccacaaacacagcgaagtaatgccatgcctgcggcggcataccgtcggggacagggataagaaacatgacacccatcaccaccagtggggccaatagtttccatatattatcttttgctaaagacatacgggttctccgaaaattaatatttccaaatttatcaagtgcttaaataattaaatctgtgctaaaaaccaggtaaggatcagtaggtcagcactgccgcctggactgagatttcgttcgatacactccctgtcgaactgccggagataatcgagatcggcgggggttcgaatgccccctttttgcaataatgtttgcgcctcgcgctgtagccagcgcaggcccccctcgccaccgcggcttgcaacgttggtatcgccgttgatcgccatcagtaggagcaaggtatcgagcaatgccagttcaggatctaacccctgatccagcagagtgaggtaatgcggcaaggcgtgattgatcaccagtggataacccgcttcggcttcaccgcgtgcgccggtaaggccaagctgttggtacaaccgttgacctgccgtcagttgactattattggtacgcagttcgcgatcggtcaggccacggcagaaacttgccgccgtagaacaaacggttgttggcgttaccggttggttgagttgaagcaaacggccaattgccgcacatagcagccctaaagaaaaaatgctgcctttatgcgtgtttacgcccgcagtggcgcggaacatatcaccttcgcaagccataccaattgggcgtaatccgtggagtaccgcttctggtgccatttccgcactacaggcaccaaattcaatgaaacggggtagccagccctgaatcgccagcgcgctgcggtggaaatcttccagcgccatatctttgtgcgcaccgcagttaatgcgatccacgaggcctggtttcggactcagattgacttcagtcagcatggcgcgccagcccagcagggcgtactcatcgattaaactcgtcgcaagctttgtggttttagtactcgttgcaggcatgctcatcgttcagcagtgcctccatgttatttagttgacgttgcaggcatcgacatcgttcagcagtgcctccatgcggttgagtaaatcggtcagttgatgggtttttccacgcgcgcagacggctgcgctttgttcgcacaacaggcagcggcgaggcggcagactatagtcgcggcgggagagaatttcgccttcgggcgtcaggacatcgatatcccataaccgcccgagaggatgactatgttcaagctcaatggtggcgagcttgaggtcgcgagccggggcggcaatgctcaacatgccctccggcccgctggcggaaaccagtgcagcctgctcctgaatttgccagccctgttttgcggctaaggcacgcaaggctgtcacgccatgattaaaaattcggcgtgtgacctcgctgtctttaatcggcccaggcgcaaccacggtaaaggagaccagtggaacaggatggcgcttgagccagacgtgttgccgtgcttgcctttcatcccggctgacgagcagctcgggaatacttaccgcatggtggctggcgagttcaggaagcaggtgcatggcttattccttcacctgatgcacaacatcgatcacgctgccatcgcggtaacgcacaacggcaacgacgcggtctgtgaattcaatcggctgtggttcaccggtcagcagacgcgcacgttcgcgcagccactcaatggaaaccactttaatgcccgcttcctgcagacgttctgccagttccggacgtgccgggttaactgcgataccgtggtctgtgaccagaatatcgacactggagcctggggtgatgcaggtcagtacgttatccaccagagtcggaatacgaccgcgtaccagcggcgcgacgatgatggaaagcgcagaggcaatcgcggtatcgcagtgaccaccggaagcaccacgcagtacgccgtcagagccggtcagcacgttaacgttgaactgggtgtcaatttccagcgcgctcagtaccaccacgtcgagacgatcaacgcttgcgcctttgctaccccagttagcgtactggttggcgctgatttcgatgtgattggggttacgggccaggctttgcgcagcatggctgtcaaagctctgcacatccagcagtttgcggatcagacctttttcgtgcaggtcaaccatcgtcgcggtaataccgccaagggcgaagtcggcgcgaatatcgcggctacgcattttgtcttccaggaaacgggttaccgccaggcttgcgccgccggtgccggtttgcatggagaaaccttctttgaagtagccagagttgacaatcacatccgcagcgctacgggcaataagcagttcgcgcgggttagtggtcatacgggtcgcgccagcgccgatttttgcagcatcgccaacgcggtcaactttgacgatcaaatcaacctgatcttgctcaatgcttgccggattatgcggataaggcagcagttcttcggtaagcatcacgacctgttttgcgttgtcggcatcaactattgcatagccgagggagccgcagcaggctttaccggtgtagccgttggcattaccgaattcatcacaggacgggacgccgaggaaagccacgtcgatattcagttcgccgctctgtaccagatgcacacgaccgccgtgagagtggatctgcaccggttctgccagcagaccacgggagatctcttccgccagtggaccacgcaggccggaggtataaatgcgggtaaccacgccctggcgaatgtgttctaccagcggcgcatggcaatcactcagggagctggacgccagggtcaggtttttaaagcccatcttcgcgatgacgtccatcaccatattgacggtcaggtcaccgccacggaaagcgtgatggaaggaaaccgtcatgccgtcctgtaaaccagagcgacgaatcgcttcttccaggttggcgcacagtttgcgatcgcgcgctttttcagcctggtaggtttgctttgggctgttctggaaagcggcaagatcgcattcagcgcgacgattccaggccgctacccgttcttgtcgttgagattgttcaattttctgcgtcattttgattgccttattcttcgcggatgccggaaagttctgcacgggagagcaccagacgggcgcgatcgataaccggaccgtccaccatcttgccgttcagggaaaccacgccgaggccttcgcgagcggcggcttcagcggcttctacgacgcggcgggcgtgatccacttctttctgggtcggtgcgtagaggttgtgcagcagatcaatctgacgcgggttgatcaggcttttgccgtcaaagcccagctgtttgatgtgggcggcttcttgcagaaatccggcttcgttgttagcgtcggaatagacggtatcgaacgcctgaatacccgcagagcgcgcggcctgcaaaatggaacagcgtgcgaacagcagttcagttccttccggggagcgttctgtacgcaggttgcgcacatagtcttctgcaccgagggcgataccgatcaaacgctcggaagcgtgagcgatttccactgcgcgggtaatccccagcggagattcaatcgccgccagcaggccggtgctgccgggttcacgaccacaggctttttcgatacgcaggatctctttttcaatatccagaacatcctgagcggtatcggttttcggcagacgcacaacgtccgcaccaccgcgaacgacggcttccaggtcgttaacaccccattcggaatccagcgcgttgacacgcacaatggtttcaatatcgcgatacagcggatgttgcagcgcgtggtaaaccatgcggcgggcggtgtctttttcacgcaatgctacggagtcttcgaggtcaaacatcagggcatcagccgggtagatgaaggagttgctgaccatcgcggcattggcaccaggcacaaacaacatgctgcggcgggtgcgagttttacgttgttgcaggctagcggaaatcattggcaatcctcccatggcagagccgggataccgctggcgcgtgccagcagggcttccagtcgtgcacgtaaaatgcagtacagtgcgcctttgtcatcgacattcagctgtacgccgcgcacgttgtagcgggcgagaacgtccagaatggtggtgcgaattgcatcgccaaactgtttctcaacgctgctattgatttgcaggtcgatatcctgcgtatcgagtggggcgatgcgtatcatcacatccccagactcaagggtgcctgcaacggcgggctggtttattttcatttttcacctgtttctcatgcgggggtcttttgacgagctgccgcgtcctggcgggagtgctcaagcaggttctgcaaataatgcagcgtgactgcagggaccagcggcgcgatagccgtgagatcgtttttcgccagcagttgacgtacccgggaagcggatatcggcatctcctggtaacgcagccgctcaatttcaaccagttcgatgggcggtgcggagatagtcggcgtttccagccagtagcgcatatcctggttgtactgggcggtaacgcgacaaaagggttcagtaccgacaaagcggtgagttacacccagcgcgggagcgaggtactgacggaaaatcttcagatcaatttcggtgtaacaatggttaatgacgctctgttctttaatgaagtagcaagggaacgtagcgcgggagatgatgtattcggagccacgatgcacagtcaggcgtggaatatcggcggtgccttttaacaccaaatccagccggtcttcataggggaagcgactagaatcttctttgactaaaaacagatgcaaccagtcgcactgtgccgcagcctgttgaatcagataacggtgaccattcgtaaagggattggcgttcatcacaatgcagccaatcttgttccctggatgacgaaattttttcaggctttcggcatagcgtttcagtcgcgtggcgctgttttccatcagcaccatcacgccgggtacgctggtcagcgtggaaaaaccgcactggcggaacagcgcctcgtattcggttttggtataaataaacagatgcgtgctgtgccgctcataggcgaggtttatcaattcagtggctaatgtcagcgccagtccttcaccgcggacggattcactgatagcaacgcatttaataatatttccggcaattccaccgcacgcgataagcttttcatcgcgggttacggtaataaatacttcgactgtggtgtcaacgctcaaatcattttcatgcaggaattgggcgatttccgccatttttttattttcactacgttttacgcgggtgaaaatatcattgccgaacataataaatagtatcctgaaggtgcatgttgttatcgatttgcaacgaatgttgttcaatgttgcaaactgataaccttttattttcacttgggagaaagggggtgatcgaggtatatctttttctcctttcgctatacatcctaaggagtatttcggcgtgaaattttgatttatttcacatagagttagtggttttttatttatttaatgattttaagttttttaattaatgtaattacgaaatgactcgcaggtttaagtgatttaattgatttaatgaataaaatttgccacgatcataattaatatctatgtattttgattcaacattttaattacatccgtcaaagaggctcgggacaacccgcaaggaaaacaatgttgcagcttaacgagaataaacagtttgcatttttccaaagactggcatttccgctgcgtatctttttgctgattctggtgttcagtatatttgtcattgcagccctggcgcaatattttacggccagttttgaggactatttaacgcttcatgtacgcgacatggcaatgaatcaggcgaaaattattgcctccaatgacagtgtcatctctgcggtgaaaacgcgtgactacaaacggctggcgaccatcgctaacaaattacaaagagataccgattttgattatgtggtgattggggaccggcacagcatccgcctttaccatcctaatccggagaaaattggttatcctatgcagttcaccaaacagggcgcgctggagaaaggggagagctacttcattaccgggaaagggagtatggggatggcgatgcgcgccaaaacgccaatctttgatgacgatggaaaagtcatcggcgtggtgagcattggctacctggtgagtaaaatcgatagctggcgggctgagtttttattaccgatggcaggtgtgtttgtcgtgctgttagggattctgatgttgctgagctggttcctggccgcgcatatccgtcggcagatgatgggcatggagccaaagcaaatcgcacgcgtggtccgtcagcaagaggcgctgtttagtagcgtttatgaagggctgattgcggtggatccgcatggttacattaccgccatcaatcgtaacgcaagaaagatgctggggctgagttcccccggacggcaatggttgggtaaacccattgttgaagtggtcaggcccgccgatttctttaccgaacagattgatgaaaaacgtcaggatgtggtggcgaactttaacggtctgagcgttattgccaaccgggaagctattcgtagtggtgatgatttgctgggggccattatcagctttcgtagtaaagacgaaatttccaccctcaatgcgcaactgacgcaaataaaacaatacgttgagagccttcgtacattgcgacacgagcatctcaattggatgagcacgctcaatggtctgttgcagatgaaagagtatgatcgcgtgctggcgatggtgcagggggagtctcaggcccagcaacagcttattgacagcctgcgcgaggcgtttgccgatcgccaggtggcggggctgctttttggtaaagtgcagcgcgcccgggaactggggctaaaaatgatcattgtccccggtagccagcttagccaactgccgccaggactggatagcaccgagtttgcagccattgtgggcaatttacttgataacgccttcgaagccagcctgcgtagcgatgaaggaaacaagatcgttgaattattcctcagcgatgaaggcgatgatgtggtgattgaagtcgccgatcagggctgcggcgttccagagtctctacgagacaaaatatttgagcagggggtcagtacgcgtgctgacgagcccggtgaacatggcattgggttgtacttgattgccagctacgtaacgcgctgcggtggtgttatcactctcgaagataatgatccctgcggtaccttatttagtatctatattccgaaagtgaaacctaatgacagctccattaaccctattgatcgttgaggacgaaacgccgctggcagagatgcatgcggaatatattcgtcacattcccggattcagtcagatattactggcgggaaatctggcgcaggcccgaatgatgatcgagcgttttaagccggggctaatcttgctcgataactatcttcctgacggtagagggattaatttactgcatgaactggtgcaggcgcattatcccggcgacgtggtgtttaccactgcagccagcgatatggaaacggtgtctgaagccgtacgttgtggtgtatttgattatctcattaagcccattgcctatgaacggctggggcaaacgctaacccgtttccgccagcgtaaacatatgctggaaagtattgatagcgccagccagaagcaaattgatgagatgtttaatgcttatgctcgcggtgaacctaaggacgagctaccgaccggcattgaccccttgacgctaaacgcggtgcgaaaactgtttaaagagcctggtgtgcaacatacggcagaaacggtggcgcaggcactgaccatcagccgcaccactgccaggcgttatcttgaatattgcgccagccgccatctgattattgctgaaattgttcacggcaaagttggcagaccacaacgcatataccacagtgggtgacatgataaagccggaggaaacttgcctccggcattactatttacttgcctgtgaccgctgctgccgttcctggcaccatcagctctgtagcaacgataacaatcaccaaaccaacaagcaccggtacgctggtgcgttttacgacttcaaacgggctgatcttcgccatcccggcaaccgcaacgactacgccagaaacggggctaagggtacggccaaggttactcgcctgcagcatcgggatagtcaaatacgccgggttaatgccggaagagtgcgccagtttcgggatcatctcaacaaacgcataaaacggcgcattgccactaccggtcgtgactgccgccagcattgtcagaatcaccaataccagcatcaggatgatactcgcgctaccaaagctggtagcgatagaaatcagactttgaataaagccgatggtgctaagcccctgagcgaataccccagcggcaaccagcagcatcaccacgttagcaaacgcatctgccatcccgcgataagccacttccagaccagagaaaactttctgggtattaaagctgcggaggaactccagaatggaggcaatcagcatacaaatcaccagaatagtgatgatgtgtaattgcggaccccatttaccgtcaaaaatcagtacaccgatgatcggcgtgaacggcaaaatggcataaaacgcaggagcagtggtggtgatttcactgacatctaacatttcatgagagatgtgctcttttttatccagataacgttgccagaagaagtgggcgatcgccatgccgataattgcagcaatactgataggcagcgtcgttttgaaggcgaagtcaatcaggctcatttcggaagcttgcgccgccagcaccacatccccactagtcggtgcgagaataatcgccgccggggaggcacaaatggcagcagctgcgccacgactgataccaacgtttaccatcaccggaaatagggttgccatcagcaaaacacccagaccggttgcggaagagacggccagagacatcagacaggcgacaaaataggcggcaatcatcagcaggtaaggggagttaatatactgcaatggtttactcgccagcttgaccaccatatcattcgcgccgatatgggtcatgtaagcggcaaatccacacagcatcataatcatcatgccgaggtcgccgccgcggctcattagtaatattttaacgtattcaacgatatccgtggcgctgtagcctgtactagcctggctggacggtaacactttgtgccccataatggcactgataatcagcaataacaggccaccgacaaataacacaccagtggcggaataccctttaatgatgtagcgagctacacccacaataaccacaaccccaataaggagctcaatgaatgtcagcataatttttcctgtctccaggccccaaagtaaataataaaaaattcctaaagcttaaggaaaaaatatgcccaataaattggcgatgaatgctgattaaaatcaagaaaaactgccattaagacattgaagttgctgtttttatacatagataacaaaacgcatatttagcggttggcaattatcacataataatgtgtgcaaattgatggtggattgatgcaaatttgttaattgcaatggtgttagctgcggctgtgcgctcaaaaaataatctaatatgagcataggttgacgatatatattatatacttcgttaagatgattgttgtatctcgttaaaaaataaaataatttttccttgattgcattttgtcatcaaaaaagacttggtttttcttttttgactattcccatcgcagaaaacgacgcatcatctttaatcgatgcgcggaaatatttaacttgaacaagcggaaataaatagagcagctattcagattattctttatgttgggtctattaaggttatgttaattgtagctttgctatgctagtagtagatttttgataaatgttttatggtcacaaatgaacgtgagtaaatatgtcgctatcttttcctttgtttttattcagttaatcagcgttggtaaagtttttgctaacgcagatgagtggatgacaacgtttagagaaaatattgcacaaacctggcaacagcctgaacattatgatttatatattcctgccatcacctggcatgcacgtttcgcttacgacaaagaaaaaaccgatcgctataacgagcgaccgtggggtggcggttttggcctgagccgttgggatgaaaaaggaaactggcatggcctgtatgccatggcatttaaggacagctggaacaaatgggaaccgattgccggatacggatgggaaagtacctggcgaccgctggcggatgaaaattttcatttaggtctgggattcaccgctggcgtaacggcacgcgataactggaattacatccctctcccggttctactgccattggcctccgtgggttatggcccagtgacttttcagatgacctacattccgggtacctacaacaatggcaatgtgtactttgcctggatgcgctttcagttttgagacaaatgaagttttagtaacttctttaaaatcaatagctaaaataagtaacatcaaaaataacgcgacttttatcactttttagtaaagttacactggacaaagcgtaccacaattggtgtactggtaaccgacacagcatttgtgtctatttttcatgtaaaggtaattttgatgtctaagattaaaggtaacgttaagtggtttaatgagtccaaaggattcggtttcattactccggaagacggcagcaaagacgtgttcgtacacttctctgcaatccagactaatggttttaaaactcttgctgaaggtcagcgcgtagagttcgaaatcactaacggtgccaaaggcccttctgctgcaaacgtaatcgctctgtaagatacgtcagcaagaattcaaaacccgcttaatcagcgggttttttttggtctttagtgtgcggtactggcgctaaacagccagaatgccagtgcggtcatggcaaaagaccccagaaggttgacgaaaacgttcagtaatgcccagccaaagcggccctcttgtaacaaaaacaccacttctgcgctaaatgtactgaaggttgttagaccgccacaaaatccggtggtgattaatactttccacactggatcaatgttcgtcatcctgctgaaccatgcgaatcctattcctatgatgaatgccccaatcaggtttgctgtcagcgtccccaacggaatcgcctgatgcagtgggttaaatcgcatacttaacagccatctcgccacgcttcccgtaccaccgccaataaaaactgctaaaagaagttgtaacactgcaaaatcctgctatttgatttgtatgagtgataagtgtaacgccgaataatcgtcgttggcgaattttacgactctgacaggaggtggcaatgctggttgccgcaggacagtttgctgttacatctgtgtgggaaaagaacgctgagatttgtgccagcttgatggcgcaggcggcggaaaacgacgcaagcctgtttgccctgccggaagcattgctggcgcgcgatgatcatgatgcagatctaagcgttaaaagtgcacagctgctggaaggcgaattcctcggactttacggcgagaaagtaaacgtaacatgatgacgacaattctgacgattcatgttcctagtacgccggggcgcgcatggaatatgctggtggcacttcaggcaggaaacatcgtcgcccgttatgccaaactgcatctctatgatgcatttgccattcaggaaagtcgccgtgttgatgctggtaatgaaatcgctccgttactggaggtggaagggatgaaggtcggtctgatgacctgttatgacttacgctttccagagctggcgctggcacaggcattacagggagctgaaatcctggtacttcctgccgcctgggttcgcgggccgctcaaagagcatcactggagtacgttgcttgccgctcgtgcgctggataccacctgttatatggtggcggcgggggagtgcgggaacaaaaatatcggtcaaagccggattatagatccctttggcgtcaccattgcggcagcgagtgaaatgcctgcactcattatggcggaagtgacgcccgaacgtgtgcgtcaggtgcgcgcgcaactgcccgtcttaaacaaccgtcgctttgcgccgccgcaattattatgatgtttttttactcggcgcttgattcaccttgttacagattgctattgtgtgcgcgcgtcgaatgaccgttaatattctctggtttttaaggcgcgttctgttgccggttatatgtcaagaaggtatctatgggtgagattagtattaccaaactgctggtagttgcggcgctggtcgttctgctgtttgggactaagaagttacgtacgctgggcggagaccttggagcggccattaaagggttcaagaaggcgatgaatgatgacgatgctgcggcgaaaaaaggcgcagacgttgatcttcaggctgaaaagctctctcataaagagtgacgtggcgagcaggacgctccctcaatatcttgttcgatacaaaaaacccgcttcaaaaagcgggttttttatcagacagatgtaagtaattattacaggattacttaacttccatccctttcgcctgcaaatcggcgtggtaagaagagcggacaaacggaccgcatgcagcatgggtaaagcccatcgccagcgcttcggctttcatttcgtcgaactcatccgggctaacgtaacgttgaaccggcaggtgatggcggcttggctgcaaatattgccccagcgttaacatcgtcacaccatgacggcgcaggtcgcgcattacctcaataatttcttcattggtttcacccagtcccaccatcagaccagacttggtcgggatttccggatgcgcttctttaaagcgttccagcagcttcaggctccagttgtaatctgcaccaggccgtacctgacggtaaatacgcggtacgttttccaggttatggttgaacacatctggtggcgttgcagtcagaatatccagagcacgatccatacgaccgcggaaatccggcaccagagtttcaattttgatttgcgggcttttttcccgaatggcagtaatgcaatccgcaaagtgctgggcaccgccatcgcgcaggtcatcacggtcaacggaggtgataaccacataacgcagcgccatatcggcaatggtctgcgccagtttcactggttcattggcatcaggagctaccgggcgaccgtgggcaacatcacagaacggacaacggcgggtacaaatagcgccgaggatcataaacgttgctgtgccgtggttgaagcattccgccaggttagggcaggaggcttcctcgcagacagaatgcaggccatttttgcgcattgcggctttgatgccctggatacgtgtagagtccgctggaagcttgattttcatccattccggcttgcgcagcagggcttcgcgctctgttgccacgtttttaaccgggataagggccatcttatcggcatcgcggtatttaacaccgcgttccatcacaatgggtttactcatagcgtgcgtgttccagttgcgaattacgaaggaaagcgtttcaattcaatagattgttgtaattatcaactatttttgaattaacgactggcagtatatcattgaaacggacctgaaagcagccaaagcggtcgcgaaaatgtaaaattgttgttggattgtgccattttatcgttctgcgctgtgatctggctgtaacaatactttttcaaaatgcattacggataacatctattactccgtgcaggatgggatcacgcaggctgaatttgttgtagtggatagagaaatctatttgctcctcatttaaggacggaaaaggcagtttttccagcggccagcagcggctaaacaggttataaaaacggctgggaataatcgctaacatgtcactgttggcaaccagtgcagcgattgtcaaaatgttgtagctggtgaaattgatttgccggtccggaaacatttcttgaactctctgccgcagaccgctgaaattttgctcttccggtaacagaagtacatgcgcagcgttgtcgatagtctctctgtcatcttctaaagagagtagtggatttccctcgcggcaaattaacaccatattgtcggtgaacagaacatgatgttgcaccgtacgattggtgcaaaacatgttatcgatgatgagatcggtttgaaactgactgagttggttttccgcgtcgctgatgggcgggttgcgcagtaaaagctgcggatagtgagttttaatcgcccgatagatgacaggaaggaccagtgctccgacgctgggagtggtcgcaatagttatcgttcgttgcttatcatagcttccttcgatatccagcgcgccaagaatggactcaaggccctgactgatatactcatgtagatgcatcgcaaatgcggtaggagtgacaccctggcctttgcgaataaacaatgggtcagggaatataacgcgcagtttctgaatagactgactgattgcgctgggggtcagattaagcactttcgctgcattaacgatccctttatgtacatatacagcttcaaaaatagtcagaaggttaagatcaatatttcgtaaggttgtaaatatttgtggtttaccttcactgctctttctgcttaaacagggttcaatttgattattactatccacgcacttactccaattttattcatggaaaaataatatttaaaaaattacaataatcttatgtctaattggaacggaacgcttttgctcaccataatcaactatttcaataggttaatcaatggggtgagttacggagcaaggcgtggcaccgcatttctgcaagtgataaagaaaatatacaaacgcgaaggagatgtaaagcattagcagatattatgagtaatgacccagtgtaaattgggccattgatgtatggaattaagcggtaatatattcgaagtccggattgtttagtagcgctaaaatattttccagtaaacgtggagcaatattattagtcgtcgcttcgggtttccattgacttattttagccatttccattccggcatacccacaaggattaatacgtaaaaatggactaagatccatattgacgtttaatgccagaccgtggaaactacaaccgcgtcgaatacgtaaacccagactgcaaattttcttttccccaacatagacacctggcgcgtcagcccgaggatgcgcttctatacccagttcagccagggtattcaccactgtttgctcaagcaaggtcaccagttcacgcacaccgagtttacggcgtttcaggttaagcaacacatacatcacctgttgccccggcccgtgataagtcacctgcccaccgcgatcgctctggatcaccggaatatcacccggcattaaaatgtgctccgcttttcctgcctgaccttgggtgaataccggatagtgctcgaccagccagatttcatcaagggtactatcatcgcgggtatcggtgaattcatgcatagcctgggagattggctcgtaaggctgaagaccgagctggcggacaagaattttatcctgatacaaaacggcatctccgtggagaatgagtaaaagtgggggaaaagtatatcacagcgaggagaggggagttacccgaccaggagccgggtaacggagaagcgagttacagaaccatgcggacaatatcgattttgcccagttcttcatacagtgtttcaacctgctcgatatgagtggcgttgatagtgatagatacgctgtggtagttgcctttgctgcttggttttaccgttggggtgtagtcacctggcgcatggcgctgtaccacttcaaccacctgatcaaccagctcaggtaacgcctgccccataactttgtaagtaaaaggagtagggaattcaagcagttcgttaagtttggttttcatgtcagctccggcgtaacgtaattaaatagcaactcccgccagaaggcgggagttttttactgatgcttagtatatggggacggaaattacactttcaagtgtttaatttttaaccaaaccagtgatggaacattaatttaatgtaatcaatgattttgccgaagaagttaccttccgggatttcttgcaacacaaccagcgggcgttgctcgatcgttttgccatcaagctggaagttgatagttccgacgacctgattcttttgcagcggcgcatgcaattcactgctgttcagcacatagctggctttcagatctttcatgcgaccacgcggaatggtcaggtacacgtctttatcaacccctaagctagcgcgatcagaatcaccaaaccaaaccggttcagaggcgaactctttacctactttcagtgggttaacggtttcaaagaaacggaagccccaggttagcagttttttactttcggcttcacggcctttaaaagtacgtccgcccattaccgcagaaatcaagcgcatctggccttcagtcgcagaagcaacaaggttgtaacctgctttgtcagtgtgtccggttttgatgccgtcgacattcaggctgttatcccataacaggccgttacggttcagctggcgaataccgttaaacgtaaattctttttctttatagatgctgtattcattcggtacgtcacggatcaatgcctggccgatcagcgccatatctcgcgcggagctgtactgaccatcagcatccagaccatgtaccgtctggaagtgggtatttttcaggcccagtgcgttaacgtagctgttcatcaagccaacaaaagcgtcctggctaccagcggcaaaatcggccatggcgacacaagcatcgttaccgctttgcaggttaataccgcggatcagctgagaaaccggaacctgcatgcccggtttgaggaacatcaggctagaacctttaaacaccgggttaccggtggcccatgcgtcgttgccgatagtgactaaatcagtttctttaaatttaccggctttcattgcctggccgataacgtaactggtcatcattttggtcaggctggcaggatcgcggcggacatctgcgttctgttcggcgagcactttgccggagttatagtcaatcaggatgtaggactccgcatcgatctgcggtacacccgggatcatagttttgatattcaggtcatcggcatgtgcagcagagataaaggctgtgcaaagagccgtggtgagcgccaggcgcttcatgatacgagcggaaaaaatggtattcatggtctgaactacgacatccgtgatggaattaaaaaagtgccctactatagcaaatgcactaccggcaggcatctgactttccgcgtgactttgttaacgtcatttacagaaattgacacatcagatgcctgctttacgttactgcgcggtagtaataaaactctgtaattgggcttcggtttgcaaacgttgctgcaaggtactggcttcggctttgctggcgaatgggccaagctggatccgccagaccgcgccattttgagttacgcgaccggggacgccgaacttctgtcccagttgctgttggtactgttgcgcacgagcctgatcgcttacggccccgacttgcaccataaagttgccgctggcgctttggctgacggcttgcggtgtcaccattgcagggctggttgcaggcgttgtgctcggagctgtaacaacgggctgtggcgcaggcgtcggttcgctgccttccagtacaccaggcgctaaggtcgttggtgcgccgaggaaaccgctactggttaccggcgcgccggtcggatcttcgctttttagcgtgctattactgaccggaagaatgtcaccctgcgggccagacacactacttgttcccgcgccaccgcttaaatcgggaggtgcaggcagggcgtaagtctgtttggcgactgtggtacaagccataccaggaccagaaaggctaccatcctgggcaacaataatcggatcgatacgaactttggtgttgttactcgtgttaagacggtcagctgccgcgcgagaaagactaataacgcggtcgttgccgtaagggccgcgatcattaatgcgcaccacgatcattcgcccgttagccaggttagtgattctggcgtagctggggatcggaagcgttggatgggctgccgtcagctgtgtcggatcgaatgcttcgccagaggccgtcaggttactgccgggttcggcatcatagattgccgccagtcccgcctggctaaatcgagacggatcctgcacgattttgtagcttttaccgtcgcgctggtaatcctgatttgccgtcgcgttcagtggttcgaaacgcgggtccgccccgctaatttcaactatagggccgttacataccgcaggctgcggtacacttaccgtctgttgctgaccatcatcgcttgtacatgccgcgagcattcctgccgcgatgcagatcccgagccactgcttacgcattgcgcacctcttacacgcttttgctcaacattttcctgtgggtgtggatactcattacaatcccgaacccagccatcagcacaattagcgcgcttcctccataactgaccagtgggagcggaacccctacaaccggcagaataccgcttaccataccaatatttacgaagacataaacgaataatatcagcattaagccgccagccatgacgcgaccaaaggtggtttgcgctctggcggctatccacagcccgcgcatgatcagcagaatgtagagagcgagcagaatcagaatgcccactaatcccagctcttccgccagtaccgcgaagataaagtcagtatggcgttcggggagaaattcaagctgactctgagtgccgtgcagccagcctttgccgcgtaatccgccggagccaatagcaattttagactgaataatgtgatagcccgcgccgagtgggtcactttccgggtccaggagcatcattacgcgctggcgctggtaatcatgcatcaggaagaaccacagaatcggaatgaacgccgctaccagcactactgcgacgccaatcagacgccagctaaggccagagaggaacagtacaaacagaccggaaagcgcaacgaggatacttgttcccaggtcaggctgtgcagccaccagcagcgtgggcataaatatcagcaccagcgcgatgccagtgttcttcaagcttggcgggcaaacgtcgcggttgataaagcgcgcaaccatcagtggtacggctattttggcaatttcgctcggctgaaaacgaacaataccgaggtccagccagcgttgagcacctttagagatggcaccgaaagcatctaccgccaccagcaaaataatacagatgatatagagatagggggcccagccttcataaacgcgtggaggaatttgcgccatcaccaccatgatgaccagacccatcgcgatttggccgattttacgctccatcatgccaatatcctgaccgctggcgctccagataaccagggcgctgtaaaccagcaatgccagtaagatcagcagcattgtgggatcgagatggactttatcccagaatgtttttttattcggattatccgtcatgattaatggtcctccgctgcggcaaccgctggattttccgcaggcagatcggtgttgttatcacccagcataatgtggtcgaggatctggcgcatcagtgtaccaaccgccggacccgcaccaccgttctccagaatcatggcgacagccacttgcggattgttgtatggcgcaaaggcggtcatcagtttgtggtcacgtaaacgctcggcaattttgtgcgcattataggtttcgttcgctttcagaccgaagacctgagcggtaccggatttcgccgcaattttgtacggtgcgctagcaaagtatttatgcgccgtaccgttagggcggttagcaacaccgtacataccgtctttcgccagctcccagtaaccggaatgaatatcgccgacgggcggttcatgcggctgtacccatggcacctgtttgccgtcttcggcggtgctcatcagcaaatgaggaaccttcacgataccgtcattaatcaggatcatcagtgccttactcatctggattggggtcgctgtccagtaaccctgaccgataccaaccggaatggtgtcaccctgataccacggttttttaaagcgtttctgtttccattcgcgggtaggcatgttgccggaacgttcttccgccaggtcgataccggtgtaatgaccataaccgaatttacccatccattcggagaggcgatcgatccccatatcgtaggccacctgatagaagaaggtatccgcagattcttccaggcttcttgtgacattcagacgcccgtggccccattttttccagtcacgataacgtttttcgctacctggcagttgccaccagcctgggtcaaacagcgtcgtattgcgcgtgatcaccccggcgctcaatgcgctaaccgccacatagggtttaactgtagacgcgggaggataaaccccctgtgtggcgcggttcaccagcggtgtattcggatcgttcaacaaggcggaataatctttgctggagataccgtcaacaaacaagtttgggtcataactaggcgtggaaaccagcgccagcaccccacctgtacgcggatcggtgactaccacagctgcgcggctacccgccagcagcgtttcaatatattgctggagtttgagatccagcgtcaggtaaatatcgtgtccggcttgcggtggtacttcttttaactggcgaataacacgcccacggttgttaacttcaacctcttcataaccggtctgaccgtgcagcacatcttcatagtaacgctcaatgcccagcttaccgatatcatgcgttgccgcatagttggccagtttgccgtcattattcaggcgttcgacgtctttatcgttgattttgctcacatagccgatgacgtgggtcaacgcgctaccgtaaggatagtaacgacgtttatagcctttaacttcgacacccggaaaacggtactgattgacggcaaagcgagctacttgtacttcggtcaggttagttttcaccggaatagaggtgaaacggtgactacgtgcgcgctcttttcggaatgcagcaatatcgtcatcggtcagatctaccacgctgcgcaaagcgtccagcgtttgctgcacgttatcgactttctccggcatcatttctatctggtagatagtgcggttgagggccagagggataccgttacgatcgtagataatgccgcggctgggcgcgataggcaccagcttaatgcggttttcattagagcgggtctggtagtcggtaaagcgaacaatttgcagattatacaggttggcgataagcacgccggtcagcagcaaaatccccaaaaaggcgaccagcgcccggcgcacaaacagcgcggactctgccgtatagtcgcgaaaagagttctgtagtttcatccgctgcgttttctactcaaagctcccttatcactcacggtgataaggatggttggtggtgatgctccacgcccggtacagactctctgcgaccagcacgcgaaccagcggatgggggagggtaagcgcgctcaggctccagctctgctcagccgccgctttacaggcagggctcaacccttcaggcccgccaatcagtagactgacgtcgcgaccatccagcttccagcgttccagctcagcggctaactgcggcgtatcccagggcttgcctggaatatcgagggtgacaatgcggtttttgcctgcggccgccaacatctgctcaccctctttgtcgagtatgcgcttgatgtccgcattcttgccgcgttttccggccggaatttcaatcagctcgaagggcatatctttcggaaaacgacgcaggtactcggtaaaaccggtttgtacccagtccggcattttcgttcccacggcgacaagttgcagcttcacgcattaactccagagtttttccagttcatacaggcgacggctctcttcctgcatgacatggacaatcacatcgcccaaatccacgacaatccagtcggcgctgttttcaccttctacgccgagcggtaacaggcccgctgcgcgagactcctgcacaacgtggtcagcaatggacataacatgacggctggacgtacccgtacagatgatcatgcagtcggtgatgctggatttgccctgaacgtctaaggcgatgatgtcctgacctttgaggtcatcaattttgtcgataacaaaatcctggagtgctttaccctgcaagttttccccctgggtgaatcaaatagataaaaatggtctgtcagtatacctgaaccagaggcgatttcgggacaattgtcgccgaatcggctttcgaaagtgggctatcatcccaccccgcgccgcagattgcatcgccatttttgtaaaacaatttctacaaagtcgtgtctggcggaaaaagtctggctgcggagaatatcagcctgcccgggtctgtcaatggtcgttgcggcttacccgtaaaaaaacagaaaagtcatgcattctcgaccccgatggcacggctattgaggacgcgtagcgtcgcgaatttttggttgatatcaatggcgctccaacacccctggtcaacgcgaaaatgccacatagcttcggcaggcatgccaattaaacgggcgattaacagactcagtacaccctgatggctgacgactaaaatattctgatagtgctgaaattcactaagccttgcgataaagcgttccacacgttggctaaatgcctgaaatccttcaccgttcgtggggattgcatgctgccagtcattgcaccacgcgctatagttttcggcatcttcttgcatgaggtcgcgatgatgtcgcatctcccagtcgccaaaaaacatttcgttgagttcaggtatgatttgcacggggagctggcggtcactgagaaccagtcgcgcggtatgctgtgcccgttccagttcactgcataaaaccagatcaaaggaaacaccatgtagcagcgtatgcagattttgcgcttgctcaataccgcgcgcggtcaggggggtgggcgcatgaccgctgtaaagaccatcgatattcgcttgcgtttcaccatgacgaattaaccacagtcgcatcatgccctccgtaacgacaggtatcagcgatacaagccttgttggttaatgtaagtcagtaccggttccggcaataaatcctcacaactttcaccgttttgcaaacgttcgcggatgatggtcgcgctgatgttaaaccacggcgtttcagccagataaattttaccggcaggctgaaggtgaagatcttccgggttatgtgtcaaatgatcttccagccattgctggtattgcggttgcgccatttcaagtgggtaacctggacgccgacagacgatcaaatgtgcattgtcgagtatcgtttcgtattcgtaccaggtcggaaaggtcagcagactatcctgaccaataataaacgccagcggcacgtccggtccttgttcctgccgccactctttcagtgtttgcgcagtgtaagagggggcattgcgctttagctcgcgttcatcaagagtaaataatggcttgtcggcaatcgccagttcaagcatgtgtttacgctgcacgctgttcgcttccggctggggacgatgcggaggaacattattagggatgattgtgacccgcgtcagaccaatcaaattcgccagcgtttccacgggttttagatgaccatagtgcaccggatcaaaggtgccgccaaacagagcctgtaaagatttcatatcaaccgtcgataaatacgtccgccaggggtttatggcacaacagaagagataacccttccagctctgcccacacactctgaccgtaatcttgtttgagggtgagttccgttcgtgtcaggagttgcacggcctgacgtaactgcgtctgacttaagcgatttaacgcctcgcccatcatgccccggcggttctgccatacccgatgcttatcaaacaacgcacgcagtggcgtatgggcagactggcgtttcaggttaaccagtaacaacagttcacgttgtaatgtgcgcaacaaaataaccggttcgctgccttccagacgcagttgctgaagaatatgcaatgcgcgcttactttttcccatcaacaaagcatcaacccaatgaaaaggggtgaaatgcgcggcatcattcaccgcctgttcaacgcgcggtaatgtcaatttgccgtctggccagagcaggcttaaacgctccagtgcctgagccagcgccagcaggttaccttcataacagtagcagagcacctgatttgccgcgtcatccagttctaagttgagctgttttgcgcgcgcagcaacccagcggggaagctgagcctgctccggtgtctgacaggtcacctgcacgctgcgattcgcaagcgcagtaaaccaggcggcattttcttgcgctttgcttaatttattaccgcggacgatcaacagcaggtcgtcatgcagaagtccggtgagtgtgagaagttgctcattgatcgccgcattcggtccgttttctggtaacaacagcaatagcgtttgtcgactggcaaacagactcatagcctggcataagctaaagatcgcattccagtcagtgttgggatcaatggaaaaagtgtggtgttcttcgaatccttgtgccgcagctacctgacgaacagcgtcctggctttcctgcaataacagaggatcgttaccaagtaaaagatacgccgcgcgcagcccttcattgagctgcgcgcggagttgttccgggtacaaccgaatcatcagttacccagcgtggtggagacgcgtgcaggcgttgccggagtatccgttgtggtgctcgtctgttcttcgtcggaacgaatatccgcagcacggatgcttggcagcttacgaatcagctgttcggcagcacggtcgtacatctcttttacgatcatgtcttgttcgttatctttcgctaacgccatttgcgggttatcgaagaagctacggaagactttggcgctaatcgggtagatatcacggccggggatcaacacggtcgcattaaccgtcatgatcatctgatactctgctgtttgaccgttacggaatacgcttgcggtatctttcgcgatgctcactttacccaaacgcaaggatggaacgtccttacgcgtggtttctttatcaagcaactcgacaccattcagacgtaactggttacgcaccgcacggcttaatggcccgttcggatcgccactgtccaggatcatgaccttcatagtggaaggaacctgcgtggtatcacgcagatgccagccacacccggcggtgattaacaccgccagagataacaacaatgttgccagatatcgcacgcttcctcccgcgcttagccaacgaccagattgaggagtttacctggtacgtaaatcactttacgtacagtaacgccatcaagatattttgctaccagatgttcctggccagcacgttcgcgaacctgttcttccgttgcgtccaccggaacggtgattttggcacggactttaccgttaacctgcaccacgaccagcgtggagtcttccaccatcgctttttcgtcagcaaccggccacggcgcgttgtcgatatcgccttcgcctttcagttcctgccacagcgtgaagcagatgtgcggggtgaacgggttaagcatacggacaacggccagcagtgcttcctgcatcagagcgcgatcctgctcgccatcggttggtgctttcgccagtttgttcatcagctccataatcgccgcaattgcggtgttgaaggtctgacgacggccgatatcatcggtcactttagcgatcgttttatgcacatcgcgacgcagcgctttctgattttcagtcagcgcatcaacgttcagtgccgcaacatcaccttttgctgtgtgctcgtaaaccagtttccagacacgtttcaggaagcggttagccccttccacaccggattcctgccattcgagagtcatatcagccggagaagcaaacatcataaacagacgaacggtgtccgcgccgtaacgttcaaccatcacctgcgggtcgataccgttgttcttgctcttggacattttgctcatgccggtataaaccagttcatggcctgccgcatctttcgctttcacgatacggcctttctcgtcacgttcaacgatagcatcaaccggggaaacccagttacgttcgccgttttcgccaacatagtagaaggcatctgccagcaccataccctgacacagcaactgtttcgctggttcgtcagagttcaccatgcctgcatcacgcatcagtttgtggaagaagcggaagtagagcaggtgcataatggcgtgttcaataccaccaatgtagatatccaccggcagccagtagttagccgcttcggaatccagcataccttctttgtactgcgggcaagtgtagcgcgcatagtaccaggaggactccataaaggtgtcgaaagtgtcggtttcacgcagtgctggcataccgttaacggtagttttcgcccactccggatctgctttaatcgggctggtaatgccgtccattaccacatcttccggcaggatcaccggcagctggtcgtccggggtcggcattacggtaccgtcttccagcgtcaccatcggaatcggcgcgccccagtaacgctgacgggaaacaccccagtcgcgcaggcggtagttcactttacgctcgccaacgcccatcgcagtcagtttatcggcgatggcgttgaaggccgcttcatggtcaagaccgttgaactcgccagagttgaacagcacgcctttttcagtcagggcttgctgagaaagatctggctcagagccgtcagctgccaggataaccggtttgatgttcaggccgtatttagaggcaaactcgtagtcgcgctggtcgtgccccggtaccgccataactgcgcccgtgccgtactccatcaatacgaagtttgctgcccaaacgggaatttcttcgcccgttaatgggtgaaccgctttaaagccagtatcgacgccttttttctccatcgtcgccatttcagcttcggcaactttggtgttacggcattcgtcaataaaggccgccagttcaggattattttccgccgctttctgcgccagcggatgacccgcagctaccgccaggtaggtacaacccataaaggtgtccgggcgggtagtgtaaacggtcagcgtgttgtcatagtcgttaacgttgaaggtgatctccacgccttcggaacgaccgatccagttacgctgcatggttttaacggtgtctggccagtgatccagtttatccagatcgttgagcagctcgtcagcgtaagcagtgattttgataaaccactgcgggatctctttacgttcaactttggtatcgcagcgccagcagcagccgtcgataacttgttcgttcgccagtacggtctggtcgttcgggcaccagttgaccgcagaagtcttcttatataccaggccttttttatacagctcggtgaagaatttctgttcccaacggtagtattccggcgtacaggttgccagctcgcggctccagtcataaccaaagcccagcattttgagctggtttttcatatacgcgatgttgtcgtacgtccacggtgccggagcggtgttgtttttcaccgccgcgccttccgcaggcagaccaaacgcgtcccagccgatcggctgcaggacgtttttgcccagcatacgctggtagcgggcgatcacgtcaccgatggtgtagttacgtacgtggcccatgtgtagtcgaccagaaggatagggaagcatagacaggcagtaatacttctctttgctctcgtcttcggttacttcaaatgtgcgcttctcatcccaatgaagctgtactttggattctatctcttccgggcggtattgctcttgcatggcagccagtggtcctgttttcaatacggctacaaatgtagcgttgaggtggtttttcagatccgcatagcatagcccaaacgtccgcgtcaaaacagcctttcgcgcactcgacgttgaaatgatgcccggattattcatacattaatttacagagtttgtgggcgtattagcaaagcaaggaacaaagaacgtctattattatagtcagttaacgacccgggagatgaaacgatgaacaaggttgctcaatattaccgtgaactggttgcgagtctgagcgaacgcctgcgcaatggcgaacgtgatatcgacgcactggtggaacaggcgcgcgagcgcgtaataaaaacaggggagttaacgcgaaccgaggtcgatgagctgacgcgagctgtcagacgtgacctggaagagttcgccatgagctatgaagagagcctgaaagaagaatctgacagcgtctttatgcgggtgattaaagaaagcttgtggcaggagctggcagacatcaccgataaaacgcagcttgaatggcgcgaagttttccaggacctcaatcatcatggggtttatcacagcggagaagtggtcgggctgggaaatctggtctgcgagaaatgtcacttccatctcccgatctacacaccggaagtgctgacgctatgcccgaaatgtggtcatgaccagttccagagacgcccgtttgagccgtaatagtctgatttcgcacagcaataaagagaatatgggccgaatgaaattccccggcccttgtttttatctttacagtaaatcttcagtctcacgaatttcctgactgacatctctggttccggaactctgaactttacgatacaggtcgagagcctgtcggagatcgacaggtcttccttctccgtagtgatacataatggccaggttataccaggcagtggcgtcattgcattcagcggctttcgtaaaccattcaaaggcagcctgataatctttctcaacgccttgtccgtgtttatacatataaccgatgttgacgtaagcgccgacgctcccctgagcggcagccttcagataccagtacatcgcttgcttatagtcctggtccaccccttcgccagcgttataatcccatgcaatttgaaactgggcgtgccgattaccctgctgtgcgcttttcaaataccagaatgcggcgagtgtcttgttttgagcaacgccttttccgtcttcataaagatcggccagattgttttgcgcgtcactatggccttgtaatgcagcttgtttgtaccagaaaaatgccagcgcatagtcttttgcgactccgttgccatttctgtacatccacccaagattattttgcgcataagacattccgctctccgcggctatctgataccagacaaccgcttctttataattgggggcttctccacgatccagtgtccagccaagggcgttggaagcgaaagtatggccttgtagggcagcttttttcagccagaagatggcttgctcattatctttatgacggcttttatcctcggtatacttttgccctaaggaatactgtgcttcacaatgaccttgctcagcggccagcttcagccagtaaaaggctttttcgtcgtccggagaatcaattgcgctatcgcgattataataaaacccaacaatatattgagcctcgcaatcgcctttttcagcacgttcgataatctcatctatacttaaattatcgcagcaactactcgtgaaaatcattatcatttccttatggttgcagataaaacatattatatttttatgtgttccatttttgcgtaagccttattttatgcgtattatgtcgcgtcagaaaagtataaataaacgagcctcgcaatgcggctaatattcatttaatgaatatttaaggataaattatatggacatggagagccaaaaaatattgtttgcactttccactccgatggaaatacgcaatgaatgctgtttacctagccatagtagtcccaaaatgtatttaggtacatgcttttttgacctttcttccagttggggaattgatgaccgtgatgacctgctgcgcacaattcaccgaatgatcgataacggtcatgccgctcggttggcagggttttatcaccgctggtttcgttatagcccatgtgaatggcgtgactatcttgctgaactaaatgagcaaggtcaggcttatgcgcaatttgtcgccagcaccgccgaatgctgtggcgaagggggaatcaaagcctgggattatgtccggatgggttttttaagccgaatgggcgtacttaataactggttgagcgaagaagaaagtctatggatccagagccgcattcatctacgggctctacgttattatagtaactggcggcaatactttgccggttatacctttggtcggcaatattggcagtctcccgaagatgatcatctgcctttattacgcgaattcttagcgcgtaaagaatacgacgattccggcaatgatatgttttatcaattatttgccagtgatgatgcgtattaccctaccttgtcctggcaaccattggcttactattctgcatgcccggaaacgcttaaggatatgagcgacctatgaaaaattgctggaagatcctcgatatagaggaaacgactgacgtcgatattatccgccgcgcttatctggcgctgttaccgtcctttcatccagaaaccgatccgcagggttttaaacaacttcgtcaggcgtatgaggaggcgctacggattgcgcagagccctgctaaatctgtttggcaaccagaagaatatgaggtagcagaacatgaaattctgctcgcctttcgtgcgttacttgcctctgatagtgaacgttttctgccctccgcctggcagcgattcattcagcaattaaattattgcagcatggaggagattgatgaattacgctggagcctgtgcacaatcgccatgaacactgcccatttatccttcgagtgcgtggtgttattagcagaaagattgcggtggttacaggaggaaaataccggggaaatagacgaagaagaactggaatcctttttatatgccattgcgaaggggaatgtttttaacttccagaccattctgcatctgcccgttgccgtgcaaaatgacaccatcgatttttaccaaatgttcgctcggatttggagtagccatccacaatggctgacattgtatttagcgcaacatcgcgcagtgattatccccgatgatgcaaaactgcacagaaatttactccgctggtatagcgcaggtcgcctggatatccccgaacttctggattacgcccagagttggcgggaaactgaacctgataatgaagatgcgccttattatgaatacgcgcaacgcgtctattgtggagaaggcgaaagcctgttggcagaactttgtgactactggcgcgagtatccctccacccaggcggatgctttaatgttgcaatggtgccgtcagcatcgggtcgattattacccattactggtgatgatgattgaagcgcgtgatctggttaacgatcagggaaaaccgctactttatgtccccggcgacagcgcccgtacgcgttttcatttatacgaaatactcagcgatgaaaaactctctgcgctggggcgtagtctggtcgagatggttttgcacaaaggacgtaagccgcggatcagtctcacgcgtgatacagaacataccttatggccattatatctagttgccaaacaattagtgcaggcctgccaacctacagaagaaagtttaatgccgattgtgagccgccttgatgcagaaaatcgttgtccactggaagcattaattattcgtcgattattaattcaggcggcgaattttaccgagaagcaaactgttgaaccggagccgcaaccgcagccaatgcccgttgacgatggtgggccaggctgtctgggcatcattaaaattattttctatatttttatctttgctggtttgatagggaaaatactccatctgttcgggtgacagtcgacgttaatgtgcgggaagcccggcaagtaatctttccgcatttttgtaatgttgtttggcggtcagttttaaccatttttgagattcataatggttaacattaataccactgccatttctgtagatcaaacctaaagtatattgagcatgagcatacccttgttcagctgcttccttataccagagaattgctttacgggtgtcgggtttgacccccagacctttgaggtagatccaccccagtttactttgcgcgcgtggattttcctgttccgcactttgctcataccagtatctcgcctgtgtataatccagtggtttaccgtcgctaccatgaagataaaattctccaaggcgatattggctcgtactgtgaccatgaatcgcggaaagctccgtggctgccgtggtgaatggaagactgcccggactgcttaaataatcaaaggcataattcaccatggctttatcacgcaacgtcgttttcttgggttggctaatacaggtaattgctgcaactataaaaattgcgaatatatacattaattttttattcatgtgtgaatgcttcgattttctttttattttgaaagcgtcaagtttatactcatcaataataaaaaagtagtcagttaatgcacttaagggattattaacaaatgaataaggaagaacaatatcttctttttgcgctttctgcgcccatggaaatacttaatcagggttgcaaacccgcgcatgacagcccaaaaatgtatactgggataaaagaattcgagctcagtagttcctggggaataaataatcgtgatgatttaattcagactatttatcagatgactgatgatggtcatgccaatgatttagctggcttatatctgacatggcatcgctcttcccctgaagagtggaaagcattaattgctggtggcagcgagagagggttgatttatacccaattcgttgcccaaaccgctatgtgctgtggggaagggggaatcaaagcctgggattatgttcgaatggggtttctgagtcgggtcggtgtgctcaacaagtggctgacggaagaagagagtttatggctgcaaagccgcgtctatgtacgagctcaccattactatcacagctggatgcactatttttccgcctatagcttaggacgtctctactggcaatcttctcagtgcgaagacaacactagcctacgcgaggcgctaaccctgtacaaatacgatagcgccgggagtcgtatgttcgaagagctggcagcgggaagcgatcgtttctatgccacgcttccctggcagccattaactgtccagtctgaatgcccggtaacgcttaaggatgtgagcgacctatgaaaacatgttggcaaatcctcgaaattgaaagcacgacgcaaatagacattatccgccaggcttatcttgctcgcttaccgttgtgtcatcccgaaaccgatccgcaagggtttaaagcattacgccaggcctatgaagaggccctgcgactggcggtaaatcctgtcgaggaagcagatgatgaagaaaaagatgctgccgctgaacatgaaatactacgtgcattcaggacattactggatagtgaaagtgatcgttttcagccttccgcctggcagaaatttattcagcaattaaatacctggaacatggaggatgtcgatcaattacgctggccgctgtgtgcaatcgccatagaagcgcgatatcttagtttaaattgtgcttctttgctggcagagcgtttgaactggcatagttttaatgacagcgaaggaatggatgaggaagaaagggaggcttttcttgaggccattcaggctggtgattgtttcgatttccttagccttctggaatatcccattgcgttgcagaaccagactgttgagtattacttcgcgctggaacgttgctgccgttaccatcctgactatgtcactgcgtttttggcgatggaaggtccgtggttaattcctgatgatgcaaagttacatcgcaaactgttgcgctggtacagcagcgtgcaaacaggtatggcggaactcattcctgtcgctcaacagtggcaaacggaagaaccagaaagcgaagatgcccggtattacttgtgtgcacaacgtttgtactgcggcgagggggaaagcctgcttgccgatctctgcgcgtactgggaaagttacccatctacacaagctgataatttgttgttgcagtggagcaagcgtcattgcccggattatttcgcgttattagtgatggttatcgaagcgcggagcatggtagatgcgcaaggtcaaccgctgaaatatgttcctggtgagagcgcccggacgcggctgttatgggcggagattttacatagcggaaaattaagcccgttaggtcaaagctttattgagagcttattcttcaagcgcaaagcatgggcgtggtggaaaagcagagtcggtagcgagacagagcaagatagtccgttcctggatttgtatcgggtagcggaacaggtagtacttgaagcgtttccgaaacaagagatgctggcccgtcttaatacaaggctggaaggcggagatgctcatccattagaggccattgtcacccggatgcttttgacgaaagtgaaactcgagccggaggatgaagatgtcgatgagccaacacctgaaaatcatgaagaaaaaaatgatgagggtgaaaaaccacagagcattaccagcattatcaaaatcagtttaacggtgctggtgataggttatgctctcggcaaaatcgcgatgttgtttagctgacgatgtgttttttgcgccgatgccggatgcagcgtttacgccgcatccggcagccgtgtttatgggatctcaatggctaaataatcgctcgcccgccgccgaacttcatccacgcgggccatatcgttactctgcaacgccgcatcaaaatcggtgatcacccggccgatctcttctcgctcgtcacccagcgcccgcgcccacaactcttccagtttggctttaaaggtgcgattgatgagcatatcgcgcggataaattttcaatgcggataaccgcgtccgactctcttcaatctgctgcgcgctcaatgttaccgggctgtggttaatcactctggacttaacgctgccgtcttccagaagcacgtcaacttcaagcaacccgttgatatcataactaaagcgaatatcaatgctctgataagccccggttttcttcaacggcacatcgaaggattccaccagaatgttgtttttaactttgtggttttctccctgatagacgttaaccgtaatactatcctgttccgggtgcatggtactataagtttctacacggctcacgggcacagtggtgtttcgttcaataatcgggctgaaaatgccggaaacgccctggcggttaacttcaacgcccaagctgtaagggcaaatatcagtgaggattacctcttcaatatcttcactgcgtaagcggcaggcggcctggattgctgcgcccagcgcgacaatggtgctcggatcgtaactttgatacggtaatttgccaaacagacgcacggcgattcgctgcaccagcggcatttgactcgcgccgccaaccagcaccagactgtcgatttgactcggcttcagacgcgcatcgcgcaacgcctgttcaatcggcactcgcaagcgattgagcagcggcaaccacaaatcttccagttcgttctcgtaaaattcgcattcccgcgtttcttcctgatactgccagcgaatgtgcaatgggctttgattgctacattttgccgcttccacacaggcgtacaaggctgccagttcactctcgttaagcgtggtcctggcgacatccgcgcgttttaaaacctcatcgaccagcatatgggtaaaatcttcgccaccaagaaagttgtcgccagcggaggcgtgaacttcaatcaccggcgtggcgtactcaagcaccgtaacgtcaaacgtgccgccaccgagatcaaacaccaggctacgggtattttgttgggtatgcaggccatacgccatcgcagctgctgtgggttcattaattaagcgtaccgcatttaacccggctaactccgctgctaaacgggtatgcttgcgttgttcatcgctgaaataagccggaacggagatcaccacatctttaatcggacgttgcagaaattcttcggcatcttcttttaaactgcgtaataccaaagaggacagttctggcgcgttaaatgtgtcgctgcctaaccgccagttggtattactgcccattgcacgtttaaataacgctgccgttttatccggatggctagtacgccgacttacagccggttttccgactaaaatatgattattttcatccatgctaattatggatggtgttaaatattcaccgaacttatttggaattaattgcgcggcaccgtctttccagacggcaattaaactattggtagtaccgagatcgataccaatggcgagttctgcattatccattgcatttatatcttgaaagaaaaagagataaacagattaagaccacccaggtaacgcgtggtgatcttaatcaatgacgtgtgttaagcgtaaaatttcagacgatcagccagtaaatcaacaaagccctgacgatcaacatcgaccattacggtggcattcggtttattgcctgtcagataataataatcaacaaccgtcataccctgggtatatttcccctgtgtttccacgccaacccagcgctcaacagaggtaaataactccggtttcaacagccaggcgatggtgcatgggtcatgcagtggtgcgccgacaaagccccatttttcgtctttatgatattcgaggaagaaatccagcagttcggcaacaatggtactaacagggttaccaatcgcgcggaaacgctcggtgtcttcaacgtggatttgtgctttatgagtaacatccagaccggccatcaccaccgggatcccactctggaagacaatttctgccgcttccgggtcaacgtaaatattaaattcagccgcaggcgtccagttacccagccccatagcgccacccataatcacgatacgggcaattttgctatgcagttccggatggctattgagcagcaaggcaacgttagtttgcggtccggtagacacaatggtgacaggttccgcactttcacgcagcgttttcgccatcagctctaccgccgtacagttttgcggtgcgaatgtcggttccggtaatgccgggccgtcgagaccgctttcgccgtgcacattgtccgcgataatcaactcacgcattaacggttttaccgcgccgcctgctaccggaatatcggtgcgattaagcaaggtcagcatacgcagaacattgcgtaaggttttttctggtgtctggtttccggcggaagacgtaattgctttgacatcaagctctggactggcgagggcgagaactattgcgatagcgtcgtcatgacctgggtcgcaatctaacagaattggcagtgccattgttgctccttgttgtgtgcttctttgcgacaagggtaacgccaggatgtaacagatacgaggggcgaaacgataaagcgtgagatggcgcgcaattgggtatgcgcgccagagtgattaatgcaggattttcgcgaggaagtcttttgcgcggtcgcttttcggatcatcgaagaaagcgtctttcgggctgtcttcgacaattttaccctcgtccataaagatcacccgattcgccactttacgggcaaagcccatttcgtgggtcaccaccatcatggtcattccttcgttcgccagttccaccatcacgtccagtacttcgttgatcatctccggatccagcgcgcttgtcggttcgtcaaacagcatcgcaataggatccatacacaacgcgcgagcgattgccacacgctgctgctgaccgccggaaagctgcgccggaaacttattggcgtgagcagaaagcccgacacgctccagcagtttcagggctttttcacgagccggcgctttatcgcgtttaagcactttcacctgcgccagggtcaggttttcgataatgctcagatgagggaacagctcgaaatgctggaataccatcccgacgcgggaacgcagctttgccagatcggttttcttgtcgttaaccacgataccatcgacggtgatttcaccttgctgcaccggttcgaggccgttgacggttttaatcagcgtacttttgccggaaccagacgggccgcaaaccaccaccacttcgccttttttcacttcggtactgcagtcggtcagcacctgaaagtgaccataccatttactaacatttttcagggtaatcattatgctgtccttcttttcaagtagctgaccaacaagctcgcgctaagactaataacgaaataaacaaatccggcaaacaggatcatctcaacctgcgtaccatcacgctcaccaatggtactggcggtacggaagaaatcggccagggataacacatacaccagactggtatcctggaacagtacgatgccctgagtgagcagcagcggcaccatcgcgcggaacgcctgcggcagaataatcagtttcatgctctgccagtgagtcattcccaacgccagcgcggcgctgctttgaccacgagaaatactttgaataccagcacggataatctcactatagtaggccgcttcaaacatgctaaacgccaccatcgcgctaattaaacggatatcattttttgggcttaatcccagcacgttttgcagaaaacccggcacgatcaggtaaaaccacagcaaaaccataactaaaggaatgctgcggaatacgttaacgtaggctttggcaaaccacgccacgggcgcaaagctggataaacgcatcaccgccagcatcgtgccccacaaaataccaatcactaccgccgtgacggtgattttcagggtgatcaccagcccgtcgagcagatatggcagggaagggacaatggaactccagtcaaactcgtacattatttgccccccatgttgccaggcaggcgaactttacgttcaaccagcgtcatcaccagcatgataaaagcgttaatcaacacatacgccagcgtaatggcggtaaagctctcccaggcatgggcactgtaatcgagcaatttacccgcctgcgccgccatatccaccagaccgatagtgctggcgatggcggagtttttcaccaggttcatcatctcactggtcatcggcgggacgataacgcgataagcattaggcagcagtacgtatcgataagcctgcggtagcgtcaggcccatcgccagcgcggcatttttttgccctcgcggcaggctctgaatcgcggcgcgtacctgttcgcaaacacgggcggcggtaaacagccccaggcagagcatggaactaaggaaaaactgaatattgggatccagctcggccttaaaccacatgccgattttctccggcagcagctccgggatcaccagataccaggtaaagaattgcacaatcaacggcacgttgcggaacagttcgacatacaacgtacccagaccagagagaaaacggtttggaacggtacgtaaaatgccgaaaaaactaccgacgaggaaagcgataatccaggcgcagatgctcaaagcgatcgtcacctgaaaaccactccagatccaaccaagataggtggtgttgccgaacggggcttgttgtaaaaaaataccccagttccagtctatagacataaatctactccagaaaaaagagggtagcagcgttaactgctaccctcgaagattgttacccagcgtattgcggttttcaggcccgatggggaacgaccatcaggcgtatagtctgtccgtgctacgtaacaatcgagagggctggaatttccgcccctggttcttgtaattagttcagtgccttgtcattcggttctttgaacagtgctttcatttcgtcactcagttcgaaattcatgttcaggtttttcggcggaattggatttttgaaccacttatcaaaccatttttccgcttcaccggaggtctgcacctgagcgatggtgtcatccatcagctttttgaactgcggatcatctttacgcaacatacaaccgtaggcctcctgagactgcggcttgccgacgatttcccagttgtctggtttcttcgctttcgcacgttcaccggccagcagagcgtcatccatcataaaggcaacggcacgaccgctttccagggtgcggaaagagtcaccgtgatctttggcgctgatgatgcgcatattcattttttgctcttcattcagtttgttgagcaaaacttcagaggtagtgccggaagtgacgactacggctttgtctttcaggttggcaaaatctttgatatcgccaccctttttggtcaacaggcgcgtaccgaccacgaaaatagtgtcagagaaagccgcctgtttttggcgttcgacgttgttggtggtagaaccacattcaaaatcgaaagtgccgttttgcagcagtggaatacggttttgactggtaatcggaatcagttttacctgcaagtccggtttgttgagtttctttttcactgcttcaacaatggcgttggagtaatcctggctgtaacccaccactttttgctgattgtcgtaataagagaaaggcacactagattcacggtgaccgacgacaatcacaccgtttttggcgattttgtccagagtactgcccgctgccggggcggcgtcatctgcctgtgccagtcctgcggaaagcgccagggcgaggattgctgtggcaggtttacgtaattgcatatccaactcctttatcttctgcgttaagaacgcatggatacccgttgtgagtgtttgtgttgttatcgtctgcaactttattgtgcagtgttgtgcctgttagggaaggtgccttaggtaacatttagtttggctaaatgtaaagatattgctgttttattgtttgtttttgcgagatgcgccgcaccattccgaagcaaaattcttaaaatgcactcttttagtgctaccgctggattactgtggtgcaactaggttgtactgatgctgtttcagggtttgccttgtataacaaagcaatagatgtgccaaagttggataggagaatattgttatccggataatgcactgatgccgcatccggtgagcgtgccgaaatatgggatgtattccggcacgataagaagggattatttacgtcgctgacgcagactcatcaacacagcagcaaaaccaaacaatgccgtcagcacccacagcggccagttgccggtacgtgcgtatggtgtgagtccggtggtcggcgtcacgttagtggttaacacctcgcgggtgaactgcgggatcatcgcctgaatctcaccctgcgggccaatcaccgccgtaatgccgttgttggtgctgcgcaacagtgggcgcgccagctccagcgcacgcattcgcgccatctggaagtgttgccatggaccaatagatttaccaaaccacgcatcgttggagatagtcagcagatagtcggtatccgggcggaagttatcgcgcacttgctcgccgagaatgatctcgtagcaaatagccgcagtaagctcaataccatttgcgctcagcggcggctggatatatggcccacggctgaagctgctcatcggcagatcaaagaacggtgctaacggacgcagaatgctctccagcgggacaaactcgccaaacggcaccagatggtttttgttatagcgatcggcactttcgtagctgtacggcgcacctttacccagcgtgatgatggtgttgtaggtatcgtagcggttctgcttattgagacgcgcgtcgacaatcccggttaccaggctgctacctttatcacgcaactcaccgtccagtgctttgaggaacggttgctgattaatttccagatcggttatcgcgctctccggccagataatcaagctacttttgcccatcagcggtgccgttgcgttgtagtaaatcttcagcgtattaagaagctggccttcgtcccatttcaggctttgcggaatatcgccctgaaccatgctaacctgaatggttttctccggttgtggggtaaaccactggatgtaacgcagcgggaagggaagggcaaacagcacgacggccaccaccagcggacgccagttgcgtttgaccaacgccagtgccagcaggccactaaccatcatcagcaggaagttaatggcttccacgcccattatcggtgccagcccttttaacgggccatcaatctggctatagccgaactgtaaccacgggaagccggtcagtacccaaccgcgcagaaactcggtcacttgccagagggcaggggcggcaatcgctacgcgcagccaggtggttttcggccacagacggctcagcacgccagcaaacagtccggtatacaggctcaaatacgccgccagcagcaccaccaggaagatgttaaccgggccaggcattccgccaaaggtcgcgatgctgacatagacccagttaataccgctgccaaagaggccaaatccccagcaaaagccaatagcggcagactggagtggacggcggttaaaggtcaacgcctgaagccccatcaggctaataatcgccgcaggccagacgtcgtaaggagagaaggccagcgttccgcaggcaccgaataataacgccagcagcaggcgaatgcgctggcgttcaattaaactggcaaaagccatgtagttatctatccagtttcggttttattcatccagcttcggctggggactgtcatccgggattttgacatgaacctgaataatacgccgactgtcggccatcgccactttgaactggtaaccgtcgatgtcgatagtttcgccacgcgccggaagatgcccaaatgcctgcatcaccagaccaccgatagtgtcgacttcttcatcgctaaagtgggtgccgaacgcttcgttgaagtcttcaatggaagccagtgcgcgtacggtccaggtatgacgactcagctgacggaagtcgatatcatcttcttcgtcatactcgtcttcaatctcaccaacaatcagttccaggatgtcttcaatggtcaccagaccggaaaccccaccgaattcgtcaataacgatcgccatgtggtaacgctgagagcgaaactctttcagcatccggtctacgcgcttactttcaggaacgacaaccgcctgacgtaacactttgtccatgctgaaggcttcagcatcgctgcgcataaacggcagcaagtctttcgccatcagaatcccttcaatgtgatctttgtcttcgctaatcaccgggaaacgactgtgggcggactcgatgatgacatcaagacattcgtccagcgtctggttgcgtttcagggtaatcatctgggagcgggggatcatgatgtcgcgaacgcgttggtctgcgatgtccatcaccccttcgagcatatcgcgcgtatcttcgtcgataaggtcgttctgcccggaatcacggatcagcgccagcagttcgtcacggtttttcggttcaccgtggaaaagttggctgagtaacagggagaaaaatcccttcttgttgcttatcgtgtcactactgtgactattgtcgtcgctcatggcgtcgtatgggttctcatgttagttaatcaaaacgccgtcgttaatcaccaacggcggggacgtctgccagtcaaatgcctggcaaattattctttctcggcaatgtacggatcctcatagcccagagcaagcataatctctgtttcgagggcttccatttcttctgcttcgtcatcttcgatgtgatcgtaacctaacaaatgcagactgccgtgcaccaccatatgcgcccagtgcgcctccagtggtttgccttgctcctgagcttccttctcaaccacctgacggcagataaccagatcgcccagtaggctcatttccatgccaggcggcacttcaaacgggaaggagagcacgttggtcggcttatccttaccgcgataggtcagattcagactgtggctttcggcggtatcgaccacgcgaatcgtcacttcgctttcttcctgaaactgcgggatcaccgcattcagccatgtctgaaactggctctcttccggtaacccggaattatcttcacatgccagttgtaaatcgaggatcacctgactcatttttgttcctgttcttcgcgcttgcgttctgctgccagcgccgcttttcgtttttgttcggcttcttcccaggcttcataggcgttaacgatacgcgccaccacagggtgacgaaccacgtcttcgctgtggaagaagttaaagctgatctcttcgacatcggccagcacttcgatggcgtgacgtaagccacttttagtattacgcggcaggtcgatctgtgtgacgtcgccggtgataaccgctttactgttaaaaccgatacgggtcaggaacatcttcatctgttcgatggtggtgttctggctctcatcgagaatgataaacgcgtcgttcagcgtacgaccacgcatataggccagcggtgcgacttcaataacgttgcgctcaatcagtttctcgactttctcaaagcccagcatttcaaacagcgcgtcgtacagcgggcgcagatacgggtctactttctggcttaaatcgccaggcaggaagcccagtttctcaccggcttctactgccggacgagtcagcagaatacggcgaatttcctgacgctccagggcatcaactgccgcagccactgccaggtaggttttacccgtacccgccgggccaacgccgaaggtaatgtcatggtcgagaatattggcgatgtactgcgcctggtttggcgtgcgcggcttaattacgccgcgtttggttttgatattgaccgctttgccgtactccggcacgctctccgcgctttgctccagtacccgcgcttctttaatcgcaaggtggatctgttccggttcgatatcctgaatctgaccgcgcatcggggcagtatcgacatacaggctacgcagaatgtctgccgcagcggtgacgcaaatcggacggccggtcagtttaaagtggttatcgcggcgattgatctcgatgccgagacggcgttcgagctgcttgatgttgtcatcaaacgggccgcacaggctcaacagacgcgcattgtctgctggctccagggtgatttcgcgagtgtctatgttcaaaccgttcctcttatctgtatgccgccggaagctgaacattcaccggcctataaggaaattattcacgccacaggaaaaaggcgcaagcattgcaataaagatggggataaagagagaaaaaacaaggcccaccggaacggcaggcctgagaattacggctgataataacccacgccaaggtcgttttctttgcgggtacgggcaatcacactttccggtgtttctgccacgcgcagacccatttcatcttcagtacgcaccactttaccgcgcagagagttcgggtagacgtcggtaatttctacatcgacgaatttaccgatcatatccggcgtgccttcgaagttgaccacgcggttattttccgtacgcccggaaagctccatgatgctcttacggcttgtaccttctaccagaatacgctgggtggtgccgagcatccggcggctccacgccatcgcttgctgattaatgcgctcttgcagaatatacagacgctgcttcttctcttcttccggaacatcatcaaccatatcggcggctggtgtacccggacgtgcagagaagataaagctgtagctcatgtcgaaattgacgtcggcaatcagcttcatcgttttctcgaagtcttcggtggtttcgccagggaagccaacgatgaaatcagaactgatctgaatatctggacgcgccgcacgcagtttacggatgatcgctttgtactccagcgccgtatgggtacggcccatcaggttcagaatgcgatcggaaccgctctgtaccggcagatgcaggaagctcaccagctccggcgtgtcgcgatacacttcgatgatatcgtcggtgaattcgatcggatggctggtggtaaagcgaatacgatcgatcccgtcgatcgcagcaaccagacgcagcagatcggcaaagcttccggtggtgccgtcgtagttttcaccacgccaggcgttcacgttctgaccgagcaggttgacttcacgcacgccctgagccgcaagctgggcaatctcaaacagaatatcgtcggacggacggcttacctcttcaccacgggtgtaaggcaccacgcagtaggtgcaatatttattgcagccttccatgatggagacaaacgcggtcggcccttcggcgcgcggttccggtagacggtcaaacttctcgatttccgggaagctgatatctacaaccgggctgcggtcgccacgcacggagttgatcatctccggcagacggtgcagcgtttgcggcccaaaaataatatcgacatagtgggcgcgctggcgaatgtgctcgccttcttggcttgccacgcagccaccgacgccgataatcaggtctggattcttctcttttaacagtttccagcgacccaactgatggaagactttttcctgagccttctcgcggatactgcaggtgttcagcagcagcacatccgcttcttccgccacgtcggtcagttgatagccgtgggtggcatccagcagatcggccatcttgctactatcgtactcgttcatctgacagccccaggttttaatatggagttttttggtcatcgacttgctcttgcgaaatagtagccaggaatgcagggcgcatagtgtaatgctttgctgccgttgtgaccagtatgagcgttatcagcccttaggggtaaaaatcctgtaaacttaaagcatattgctaacaggatgattgaccatgacaaatcaaccaacggaaattgccattgtcggcggaggaatggtcggcggcgcactggcgctggggctggcacagcacggatttgcggtaacggtgatcgagcacgcagaaccagcgccgtttgtcgctgatagccaaccggacgtgcggatcagcgcgatcagcgcggctagcgtaagtttgcttaaagggttaggggtctgggatgcagtacaggctatgcgttgccatccttaccgcagactggaaacgtgggagtgggaaacggcgcatgtggtgtttgacgccgctgaacttaagctaccgctgcttggctatatggtggaaaacactgtcctgcaacaggcgttgtggcaggcgctggaagcgcatccgaaagtaacgttacgtgtgccaggcagcctgattgcgctgcatcgccatgatgatcttcaggagctggagctgaaaggcggtgaagtgattcgcgcgaagctggtgattggtgccgacggcgcaaatagccaggtgcggcagatggcgggaattggcgttcatgcatggcagtatgcgcagagctgcatgttgattagcgtccagtgcgagaacgatcccggcgacagcacctggcagcaatttactccggacggaccgcgtgcgtttctgccgttgtttgataactgggcaagcctggtgtggtatgactctccggcgcgtattcgccagttgcagaatatgaatatggcacagctccaggcggaaatcgcgaagcatttcccgagccgtctgggttacgttacaccgcttgccgctggtgcgtttccgctgacgcgtcgccatgcgttgcagtacgtgcagccagggcttgcgctggtgggcgatgccgcgcataccatccatccgctggcggggcagggagtgaatcttggttatcgtgatgtcgatgccctgattgatgttctggtcaacgcccgcagctacggcgaagcgtgggccagttatcctgtcctcaagcgttaccagatgcggcgcatggcggataacttcattatgcaaagcggtatggatctgttttatgccggattcagcaataatctgccaccactgcgttttatgcgtaatctcgggttaatggcggcggagcgtgctggcgtgttgaaacgtcaggcgctgaaatatgcgttagggttgtaaccttacaacattgccggatgcgtgccaaccgtaggtcggataagacgcggcagcgtcgcatccgacattgaaggataagacgtgtcaacatcgcattcgacattgaatgaacgcagaaaagcaaaaagctcgccgaagcgagcttttttaatgtggctggggtacgaggattcgaacctcggaatgccggaatcagaatccggtgccttaccgcttggcgataccccaactgggtgcacttacaaggtaagcgtcttgaataaattggctggggtacgaggattcgaacctcggaatgccggaatcagaatccggtgccttaccgcttggcgataccccaacaaattggttttgaatttgccgaacatattcgatacattcagaatttggtggctacgacgggattcgaacctgtgaccccatcattatgagtgatgtgctctaaccaactgagctacgtagccagattgtttcttcgatggctggggtacctggattcgaaccagggaatgccggtatcaaaaaccggtgccttaccgcttggcgataccccaataaccgggcggtgaaccgcttactcgaagaagatggctggggtacctggattcgaaccagggaatgccggtatcaaaaaccggtgccttaccgcttggcgataccccatccgtacaacgctttctggtgaatggtgcgggaggcgagacttgaactcgcacaccttgcggcgccagaacctaaatctggtgcgtctaccaatttcgccactcccgcaaaaaaagatggtggctacgacgggattcgaacctgtgaccccatcattatgagtgatgtgctctaaccaactgagctacgtagccatcttttttttcgcgataccttatcggcgttgcggggcgcattatgcgtatagagccttgcagcgtcaacctctttttcaaggaaaattgctcgaaagtgactgtttggttaggttgcgaacagcgtggcgctatattcgtcaattattgtttactttgtgttttttcccaccctacagccattcttttgtcatacaggatgaaattcggaatttaacaatagtggtgggaaattaatctatgaaatactggcctacagtgatgagttgtcaaacagtgatgtggcaaacccggaacatttccttactgcatatcagaatcaacaagcacctcaataactgaaacagccccggatttcaccggggctgtttcgcatttcttacttatacgcgctctggtgaacaccaaccgcgcgaccagacggatcgtccattttcttgaacgcttcatcccattcgatcgctttagcggaagaacaagcgacggaaggaccgcccggcacgcactcagcggcgctcggaagcgggaatagttcttcaaagatctcccgatacaagtacgcttctttagaggttggcgtgttgtacgggaagcggaagcgggcagtttccagttgctgatcagaaacctgctgcgcagccacttctttcagggtgtcgatccaactgtaaccgacgccatcggagaactgctctttctgccgccaggccacgcttgcaggcagatacgcttcaaaacattcacgcaggatgtgtttttccattttgccgttaccgcacattttatcctgtgggttaatacgcatcgccacatcaaggaattttttgtcgaggaacggaacgcgtgcttccacgccccaggcactcatcgctttgttggcacgcgcgcagtcatacatatgcagggccagcagtttacgcaccgtctcttcatgcagttctttggcattcggtgctttgtggaagtaaagataaccgccgaacacttcatcagaaccttcaccggacagcaccattttaatgcccatcgccttgatcttacggctcattaaatacatcggtgtactagcgcgaatagtggtcacatcataagtttcgatgtggtaaatcacgtcgcggatggcatccagaccttcctgtacagtgaagtgaatttcgtgatgcaccgtgcccagatggtttgccacttcctgggctgctttcagatccggactacccggcagacctacagcaaaggagtgtaactgcggccaccaggcttcagagcgttcctgatcttccacgcgacgggctgcgtatttcttggtgatagcggaaataatactggaatccagaccaccagaaagcagcacaccgtaaggcacatcagacatcagatggcttttaacactatcttccagtgcctgacgcagctcgtttttgtcggtcacgttatctttcaccgcatcgtagtcgaaccagtcgcgatgatagtaagaacggatttcgccgtcctggctccacaaatagctccccgccgggaactctttaatcgtgcggcaaactggcaccagcgctttcatttcactggccacatacagctgaccgtgttcgtcataccccatatacagtgggatgatccccagatggtcgcgaccaatcaggtaggcatctttttcgctgtcgtacagtgcaaaggcaaacatgccctgcaagtcgtcgagaaattccggccctttttcctgatacagcgcgaggatcacttcacagtcagacccggtctggaactggtaacgatcgccatattcggcgcgcaatgcctggtggttgtagatttcaccgtttaccgccagtacgtgggttttttgttggttgtagagaggttgcgcccccgcgttaacgtcaacaatactcagacgttcgtgggcgagaatggcgttatcgctggcataaataccggaccagtccgggccacgatgacgcatcaggcgactcagctcgagggctttcttacgcagctcaactgcgtctgttttgatatcgaatacgccaaaaatactacacataaccttctccgttaacctggtatttgttgcttgttgtgtttgcttgtttaaaaaaatgccgcaaagcagcactgtgcgcaagcgatttggcggtgaaaaaataaaaaacgtaatggtgattgtcgattggtgaaaaaaggtctggtgtgaggatatatttattgatgaatcgataatttttagcgggttttattgaatgtttatattttacgggggccaaattgctgacaaagtgcgatttgttcatgccggatgcggcgtgaacgccttatccggcctacaaaagcatgaaaattcaatatattgcaggagctgcgtaggcctgataagcgtagcgcatcaggcagtttggcgtttgtcatcagagccaaccacgtccgcagacgtggttgctattcagataacgtcgatttcagcgacactcgggtaaatccagctggggcggaaaggcatactgtcgatatcgtcgaggctgctaacaccagaaagcaccagaatcgtctccagacctgcctggaagccggccagaatatcggtacgcaggttatcgccgacaatcaccgtttcttcgctatgcgcctgcattttgtttaatgctgcgcggatgatccacgggctgggcttaccaacatagaacggtttgcgcccggagattttctcaatccctgcacacaacgcgccacaagcgggataaaaaccgcgcccgtgggtgtccggattggtggcgataaaacgtgcaccgttagcgacgaaataggctgctttatgcatcatgtcccagttgtaggaacgcgtttcgccaacaatcacgaaatcagggttcacatcggtaatagtgaaaccggctttgtacagttcatgaatcagtgcgccttcgcccaccacatacgctttcttgccttcctggcgacgcaggaaatcggcagtcgccatcgcagaggtataaaacacgctgtcaggtacatcgacacctgcggtggcaaagcggttcgccagatcttgcccagtctggctaggatagttggtcagcaacaccagcggcaggcctttatccataatcccgtgcaaaaattccgctgcacccggtacggcgacgttatcgtgcatcagcacgccgtcgatatcgcaaattacatttttaatggtcatggactacccagaatattgacaacaataagcgccactataaaagcacattaattttccagcaaatgctggagcaaaataccgttgagcatggcgcgttttaccagcgcaaaagcgccgattgcgctgcggtgatccagctcagaacgtaccaccggcagattagtgcgaaacgccttcagcgcctgggtattaatgcagctttcaatagcagggagcagcactttatcggcttcggtgatttcaccggcaataacaattttttgcggattaaataagttgatagcaatggcgatggttttacccagatgacgaccgacatactcaattacttcgctcgccagactatcgcctttgttcgcggctttgcagatagttttgatggtgcagtcgtccagcggcacgcggctctggtagccctgctttaacagattcaacacccgttgttcaatggcagcgttggcagcgatagtttccaggcagccaaagttgccgcagtggcagcgttcacccagcggttcgacctgaatatggccaatttcaccgacgttgccgttgcggccaataaaaatgcgcccgttagagataatcccggccccggttccgcgatggacacgcaccagaatggagtcttcgcaatcctgacttgcaccgaagtagtgctccgccagcgccagactacggatatcgtgaccaacgaaacaggtcactttaaaacgttcttccagagcttctaccagcccccagttttctacctgaatatgcggcatgtaatgaattttgccgctgtccgggtcaacaagccctggcaggatcacgctaatcgcgatcagctcgcgcagtttgcgctggtagctatcaataaactgagcaatggcattcaacagggcatgttccagcgtttgctgggtacgttccggcagcgggtaatgttcttctgccagcactttgctgctgagatcaaacagagtgatggtggcgtcatgacgaccaagccgtacgccgattgcgtggaaattgcgggtttcggtgacgatggagatagcgcggcggcccccggtggaggcctgctgatcaacttctttgatcagcccgcgttcgataagctgacgcgtaattttggttacgctggcgggggcaagctggctttgctcggcaatctgaatccggctgattggcccgtactggtcaatcaggcgataaaccgccgcgctgttaagctgttttacgagatcaacattacctatctgagcttgtccgcctggtgtcatactttctcttattgagttacgacctcgttaccgttaacgatggtcttggtgattttaaaatcaggtgtgaatgcagtcaggttggctactttacctgcggcgagtgtgccgagacgtttctcaacgccaatcgcacgcgccggatagagcgtcgccatacgtagcacttcatccagtgcgataccgcaatgttcgaccagattacgcacgccttcaatcatggttaaggaactaccgcttaacgtaccgttctcatccacacaaagtccgttacggtagtatattgttttacccgcaaaaatgaactgttcaatgttggcacctgctggcgcggtggcgtcagtaaccagacacagtttgtcgcctttcagacgtttagcgttgcgaatgttggcgtaatcaacatgcaggccatcagcaataataccgcaataaatgtcagcttcgtcgaggatcgcgcccgccaggccaggttcacgaccggtaatatacggcatcgcgttgtacagatgggtggcaaaggtaatccccgcgcggaaaccggcttttgcttctttcaacgtcgcgttggagtgaccggcagaaaccacaatcccggcatttgccagtttgctgatgacttccgcaggaaccatttccggtgccagggtcactttggtaatgacgtcggcgttttcacacaggaaatcgaccagcgcggcatcaggcttacgcacaaaattcggattatggatgcctttttttaccagattcagccacggaccttccagatgcagacctaacgcctgattcggatgttttgccaggtactcgcgcataacgcgcacgccctgtttcatcagctcatcgctggtggtgataagcgtcggcagatagttagtacagccacttttctcattggctttctgcatgatttccagcgtttccacgctgaccgcttcagcggtgtcgttaaactgtacgccgccgcagccgtttaactgcacatcgataaaaccgggggagagaatggccccgttcagactacgttgttcgatctctggcggcagttccgctaccggacagacgcttttaatcaggccatcagcgataacaaccgcgtggtcatcaagaaattcgtggccggtaaagatccggccctgggttaatgcatacattctgacccccgattttaaaaaatattgccctgagcaaggagccagggcagggataacaattacagacctttgatattttctgcttctaattcattgaaatatcttaaagtcttaactttcagctccatggtggaaggttcatcgcacaccatgatcgctttcggatgcagttgcagacagctgatggtccacatatggttcacgcaaccttcaacggcggcctgcagcgccagtgctttctggctacccagcaccagaatcatcacttcttcggcatccagcagtgtaccaacaccgacagtcagggcatattttggcacctgattaacatcgttatcaaagaaacgagagtttgcgacgcgagtgtcatgagtcagggttttgatacgagtacgagaagccagagaagacgccggttcgttaaatgcaatatgaccgtcgttacctacaccgcccataaacagatgaatttttccgtaagaacggattttttcttcatactggcggcactcggcgtcgatatccggggcgttgccgttgagaaggttgatgttttctgctggaatatcaacgtgatcgaagaaattacggtgcataaagctgtagtagctttccggatgctctttcggcagaccgacatattcgtccatgttgaaggtgacaacgtgcttaaagctgacctggcctgctttatgcatttcgactaacgctttataggtggtcatcggcgtgccgccagtcggcaggcccagtacaaacggacgatcggcagtcggtttgaacgcattgatacgattgacgatatggcgagcagcccatttgccgacctgttcagcggtagtcagggggatcagtctcattattcacctcaataagtaaaatgtaagccgttggcggattaggcatctttaagcgtaacctggatttgcgcagacaggcgtcaatccgacctgattttttgaatgataaaataagttttctggtttagccagtaaaagggagtgataataacgatatttggtgacaaaactcacaaaagacacgcgtttaatttgcgatacgaattaaattttcacacactctgtagcagatgatctaacaatctgattacagaacatcggcagtacaatttgcagcaaaataaaaatacggcttgaaacgagccaaatagggttctcgtagggggaataagatgaatattttaggttttttccagcgactcggtagggcgttacagctccctatcgcggtgctgccggtggcggcactgttgctgcgattcggtcagccagatttacttaacgttgcgtttattgcccaggcgggcggtgcgatttttgataacctcgcattaatcttcgccatcggtgtggcatccagctggagcaaagacagcgctggtgcggcggcgctggcgggtgcggtaggttactttgtgttaaccaaagcgatggtgaccatcaacccagaaattaacatgggtgtactggcgggtatcattaccggtctggttggtggcgcagcctataaccgttggtccgatattaaactgccggacttcctgagcttcttcggcggcaaacgctttgtgccgattgccaccggattcttctgcctggtgctggcggccatttttggttacgtctggccgccggtacagcacgctatccatgcaggcggcgagtggatcgtttctgcgggcgcgctgggttccggtatctttggtttcatcaaccgtctgctgatcccaaccggtctgcatcaggtactgaacaccatcgcctggttccagattggtgaattcaccaacgcggcgggtacggttttccacggtgacattaaccgcttctatgccggtgacggcaccgcggggatgttcatgtccggcttcttcccgatcatgatgttcggtctgccgggtgcggcgctggcgatgtacttcgcagcaccgaaagagcgtcgtccgatggttggcggtatgctgctttctgttgctgttactgcgttcctgaccggtgtgactgagccgctggaattcctgttcatgttccttgctccgctgctgtacctcctgcacgcactgctgaccggtatcagcctgtttgtggcaacgctgctgggtatccacgcgggcttctctttctctgcgggggctatcgactacgcgttgatgtataacctgccggccgccagccagaacgtctggatgctgctggtgatgggcgttatcttcttcgctatctacttcgtggtgttcagtttggttatccgcatgttcaacctgaaaacgccgggtcgtgaagataaagaagacgagatcgttactgaagaagccaacagcaacactgaagaaggtctgactcaactggcaaccaactatattgctgcggttggcggcactgacaacctgaaagcgattgacgcctgtatcacccgtctgcgccttacagtggctgactctgcccgcgttaacgatacgatgtgtaaacgtctgggtgcttctggggtagtgaaactgaacaaacagactattcaggtgattgttggcgcgaaagcagaatccatcggcgatgcgatgaagaaagtcgttgcccgtggtccggtagccgctgcgagtgctgaagcaactccggcaactgccgcgcctgtagcaaaaccgcaggctgtaccaaacgcggtatctatcgcggagctggtaagcccgattaccggtgatgtcgtggcactggatcaggttcctgacgaagcattcgccagcaaagcggtgggtgacggtgtggcggtgaaaccgacagataaaatcgtcgtaagtccagccgcagggacaatcgtgaaaatcttcaacaccaaccacgcgttctgcctggaaaccgaaaaaggcgcggagatcgtcgtccatatgggtatcgacaccgtagcgctggaaggtaaaggctttaaacgtctggtggaagagggtgcgcaggtaagcgcagggcaaccgattctggaaatggatctggattacctgaacgctaacgcccgcagcatgattagcccggtggtttgcagcaatatcgacgatttcagtggcttgatcattaaagctcagggccatattgtggcgggtcaaacaccgctgtatgaaatcaaaaagtaatctgctttatgcctgatgcgacgcttgagcgtcgcatccaacaatgacaagcggtggagatcttctctgccgctttttttttcatcaatcatccccataatccttgttagattatcaattttaaaaaactaacagttgtcagcctgtcccgcttataagatcatacgccgttatacgttgtttacgctttgaggaatccacgatgagtgaggcagaagcccgcccgactaactttatccgtcagatcatcgatgaagatctggccagtggtaagcacaccacagtacacacccgtttcccgccggagccgaatggctatctgcatattggccatgcgaaatctatctgcctgaacttcgggatcgcccaggactataaaggccagtgcaacctgcgtttcgacgacactaacccggtaaaagaagatatcgagtatgttgagagcatcaaaaacgacgtagagtggttaggttttcactggtctggtaacgtccgttactcctccgattattttgatcagctccacgcctatgcgatcgaactgatcaataaaggcctggcgtacgttgatgaactgacgccggaacagatccgcgaataccgcggcaccctgacgcaaccgggtaaaaacagcccgtaccgcgaccgcagcgttgaagagaacctggcgctgttcgaaaaaatgcgtgccggtggttttgaagaaggtaaagcctgcctgcgtgcgaaaatcgacatggctagtccgtttatcgtgatgcgcgatccggtgctgtaccgtattaaatttgctgaacaccaccagactggcaacaagtggtgcatctacccgatgtacgacttcacccactgcatcagcgatgccctggaaggtattacgcactctctgtgtacgcttgagttccaggacaaccgtcgtctgtacgactgggtactggacaacatcacgattcctgttcacccgcgccagtatgagttcagccgcctgaatctggaatacaccgtgatgtccaagcgtaagttgaacctgctggtgaccgacaagcacgttgaaggctgggatgacccgcgtatgccgaccatttccggtctgcgtcgtcgtggttacactgcggcttctattcgtgagttctgcaaacgcatcggcgtgaccaagcaggacaacaccattgagatggcgagcctggaatcctgcatccgtgaagatctcaacgaaaatgcgccgcgcgcaatggcggttatcgatccggtgaaactggttatcgaaaactatcagggcgaaggcgaaatggttaccatgccgaaccatccgaacaaaccggaaatgggcagccgtcaggtgccgtttagcggtgagatttggattgatcgcgccgatttccgcgaagaagctaacaagcagtacaaacgtctggtgctgggtaaagaagtgcgtctgcgtaatgcttatgtgattaaggcagaacgcgtcgagaaagatgccgaaggtaatatcaccaccatcttctgtacttatgacgccgataccttaagcaaagatccggcagatggtcgtaaagtcaaaggtgttattcactgggtgagcgcggcacatgcgctgccggttgaaatccgtttgtatgaccgtctgttcagcgtgcctaacccaggtgctgcggatgatttcctgagcgtgattaacccggaaagcctggtgatcaaacagggctttgctgaaccgagcctgaaagatgcggttgcgggtaaagcattccagtttgagcgtgaaggttacttctgcctcgatagccgccattctacggcggaaaaaccggtatttaaccgcaccgttgggctgcgtgatacctgggcgaaagtaggcgagtaattttaagtttcgctatgccggatggggcgtttacgtcgcatccggcaaggaacagacaaacagtttcaaacgctaaattgcctgatgcgctacgcttatcaggcctacatgatctctgcaatatattgagtttgcgtgcttttgtaggccggataaggcgttcacgccgcatccggcaagaaacagcaaacaatccaaaacgccgcgttcagcggcgttttttctgcttttcttcgcgaattaattccgcttcgcaatttatccataaaataaatttaaaataacaaaacataattaaataaaatgtaaccgctttcatcttgctggaatttcacgcttttattcttctgcaagcctttcaaccgcaaacttaagccttgtaacaaaaatcatcaaaatatgtgcggttgctcatgttcttacattctggttacagaaagagattgataattcgcgtcgcgaaaaatagtctgttcctgtagtcagcgagacttttctcaacgctacttttttaatttttattttttcgctgttcacctttggtgcagcaatttatacgtcaaagaggattaacccatgcgtacgtttagtggcaaacgtagtacgctggcgctggctatcgccggtgttacagcaatgagcggctttatggcaatgccggaggctcgcgccgaaggattcatcgacgatagtaccttaaccggcggtatctattactggcagcgtgaacgcgaccgtaaagatgttaccgacggcgacaaatacaaaaccaacctttctcactccacctggaatgccaacctcgattttcagtccggttatgctgctgatatgttcggccttgatattgctgcgtttacggcgattgaaatggcggaaaacggcgacagctcccacccgaacgaaatcgcgtttagtaaaagtaataaagcctatgacgaagactggtccggcgacaaaagcggtataagcctgtataaagctgcggccaaatttaaatacggtccggtttgggcgagggcaggttacattcagccaactggtcaaacgctgttagcgccgcactggagctttatgccaggtacttatcagggggcggaagccggggcgaattttgattacggcgatgctggtgcgttgagtttctcctacatgtggaccaacgaatacaaagcgccgtggcatctggaaatggatgagttttatcagaacgataaaaccaccaaagttgattatctgcactcctttggggcgaaatacgacttcaaaaataacttcgtactggaagcggcatttggtcaggcggaagggtatatcgatcaatattttgccaaagccagctacaaatttgatatcgccggtagcccgttaaccaccagctaccagttctacggtacccgagataaagttgacgatcgcagcgtcaacgacctttatgacggcaccgcctggctgcaagcgttgacctttggttaccgggcggctgacgtagtggatttgcgcctcgaaggcacctgggttaaggctgacggtcagcagggatacttcctgcaacgtatgactccaacctacgcttccagtaacggtcgcctggatatctggtgggataaccgttctgacttcaacgccaacggcgaaaaagcggtcttcttcggtgcgatgtatgacctgaaaaactggaatcttccaggcttcgccatcggcgcttcctacgtttacgcatgggatgctaaacctgcgacctggcagagcaatccggatgcgtactacgacaaaaaccggactattgaagagtctgcctacagcctggatgcggtctataccattcaggacggtcgcgccaaaggcacgatgttcaaactgcatttcaccgaatacgacaaccactccgacatcccaagctggggcggtggttacggcaacatcttccaggatgagcgtgacgtgaaatttatggtaatcgcaccattcaccatcttctgatgcccgacgcggcaggttttgtgcctgccgcacgtttgaggaatttgctatgaaaaaactgattctcatcgccataatggcaagcgggctggtagcttgtgcgcaaagtaccgcgccacaggaagacagtcgtctgaaagaggcatacagcgcctgtatcaacaccgcacaaggtagcccagaaaaaattgaagcctgccagagcgtgttaaacgtgctgaagaaagagaaacaacatcagcagtttgccgaccaggaaagtgtacgcgtactggattatcagcagtgtctgcgtgcaacgcaaaccggaaatgatcaggcggtgaaagccgattgtgataaagtctggcaggaaatacgcagtaataacaaataagtgagagctgtaactctcgcttttcttatttcccttgcataaaaaagccaacccgcaggttggcttttctcgttcaggctggcttatttgccttcgtgcgcatgttcatcttcgcggcaatcgccttcggcacagtgaccgtaaagatagagactgtggttagtcaggcgaatgccatgttttgcggcaatttcacgctgacgcgcttcgatggaatcatcactaaattcgataaccttgccgcagtcgaggcagatcaggtgatcgtggtgatgttgctgtgtcagttcaaatacggatttaccgccttcaaaattgtggcgggtgacgataccagcgtcgtcaaactggttcagtacgcgatataccgtagccagaccaatttcttcacccatatcgatcagacgtttgtataaatcttccgcactgacgtgatggttgtccggctcctgaagaacttccaggatttttaaacgaggaagcgttactttcaggccagctttctttagggcggtattgttatcagtcatgcggaatctgtcctgttactaagcggttcacttcattagaagaagtgacagaatttgctcttgagataatgcgtatcattatagaattgccacgcctaaatgaaaaccacaagtccctggcaaatattgttaataaaaacgtggcacagcttacatttacaacggcaaggccacttgaacaccgggacattgtacaggtacaacagcaaaagttacaaatttgtagcaattattttgattggcattatctattaatacggcgtagacatgagtctacgccgcatcacatcaggcattgagaatttcgtcgagatgcaactcttcagaaatctgtttaacccatttttctacacgttcagcggtcagttccggctgacggtcttcgtcgatagccagaccgacaaagtggtcgtcatctgccagacctttacttgcttcgaaatgatagcccgcagttggccagtgaccaacgatggttgcaccgcgcggttcaatgatgtcgcggatggtgcccaatgcgtcgcagaaatattcggcgtaatcttcctggtcaccacaaccaaacagcgcaaccagtttgccgttgaaatcaatctcttcgagagtcgggaagaagtcatcccagtcacactgcgcttcgccgtaataccaggttgggatgcccagcagcagaatgtcataagcttccagatcttctttgctgctttttgcaatgtcatggacatcggcaacgtctttaccaagctgtttttgaatcatttttgcgatattttcggtattaccggtgtcgctgccgaaaaagatgccagtgatagccatgagtgaaataacctcttgaaacttattgaaatgggggtggaaaattgcccacggataaaggcaatcatagcagaacaggcagtcttgcggaatcagcaaacgagcaggactgcacactgtgctacatgaaagtggaaatttaaacgatgccctgactacgcagcgccgccagttgctgcattaacatctcttcgatcagttcgctacggctcatattgcggctctccgccagctcgttcagcgcctcgacagcttccgcgttcagcttcagttcgacacgcttaaggccacgtactttgtcgcgttttagctggttgcgtttattaatacgcagctgttcatcgcggctaagcggattagttttcggtcgtcccggtcgacgctcgtgcgcgaacagatctaatgtcgtacggtccgtttgttctttggccatgatcttggtgacttcgggggaaacaatcagccaggcctctgcccggatggatagcgcgccataatacatcagcgcgatgagtcacgccaacgcccacgcgcggaaagcgacgcggacgctgggtttttaatcagttgcgttaatcattgagatagcgacggatagcgcgtaataccgcatccggtttttcagcatggacccagtgacccgcgcctgcaatcacatgcgcccgtgcctgtggaaattgagccagtaaatcatcacggtactgctcgctaacatacggagaattgccgccagggataaacagggcagggtgatcccatgccgggattttctcccaacctacaatatgcggatactgatcccacaataccggcacgttaaagcgccactccccgtcaacaaaagatttcagcagaaactgaatcaccccttcttcattaagatgctggcgcattattgctgctgcttgctggcgagtttgtgcgtcgctttcactgaccgcgttgatagccgcaaaaatctcatcatgacggcgtacgtgatagtcgaccggcgcgatatcgatcgccaccagtttatcgatgcgatcggaggctagtgcagtaagtgccattaccgctttaccgcccatggagtgaccgataaatgttgctttgtcgatctgctgtgcatccagagtatcaacaagatcctgcgccatcgccgggtaattcattaccggatctctcggactaagaccgtggttacgcatatcaacctggatgatattgtgatcgtttaccagatcgcgagccagtacgccaaggttgtcgaggctgccaaacagaccgtggacaagaacgatgggagaattattgtgctggttttgtgcagtttgcgcgcggatattcaatttcatggcaaagttctttttttcgcgttgtcgggttagggtattatgttgaccattgtgccacagggctgcaacaaataaggtttattccgagtttttctgcaagccaggcttgacgctatccgctgccgggatttattcatatactcctggcgacttgtattcagctaagacactgcactggattaagatgaaaacgattgaagttgatgatgaactctacagctatattgccagccacactaagcatatcggcgagagcgcatccgacattttacggcgtatgttgaaattttccgccgcaagtcagcctgctgctccggtgacgaaagaggttcgcgttgcgagtcctgctatcgtcgaagcgaagccggtcaaaacgattaaagacaaggttcgcgcaatgcgtgaacttctgcttagcgatgaatacgcagagcaaaagcgagcggtcaatcgctttatgctgctgttgtctacactatattctcttgacgcccaggcgtttgccgaagcaacggaaagcttgcacggtcgtacacgcgtttactttgcggcagatgaacaaacgctgctgaaaaatggtaatcagaccaagccgaaacatgtgccaggcacgccgtattgggtgatcaccaacaccaacaccggccgtaaatgcagcatgatcgaacacatcatgcagagcatgcaattcccggcggaattgattgagaaggtttgcggaactatctaaaacgttgcagacaaaggacaaagcaatggcaatccacaatcgtgcaggccaacctgcacaacagagtgatttgattaacgtcgcccaactgacggcgcaatattatgtactgaaaccagaagcagggaatgcggagcacgcggtgaaattcggtacttccggtcaccgtggcagtgcagcgcgccacagctttaacgagccgcacattctggcgatcgctcaggcaattgctgaagaacgtgcgaaaaacggcatcactggcccttgctatgtgggtaaagatactcacgccctgtccgaacctgcattcatttccgttctggaagtgctggcagcgaacggcgttgatgtcattgtgcaggaaaacaatggcttcaccccgacgcctgccgtttccaatgccatcctggttcacaataaaaaaggtggcccgctggcagacggtatcgtgattacaccgtcccataacccgccggaagatggtggaatcaaatacaatccgccaaatggtggcccggctgataccaacgtcactaaagtggtggaagacagggccaacgcactgctggccgatggcctgaaaggcgtgaagcgtatctccctcgacgaagcgatggcatccggtcatgtgaaagagcaggatctggtgcagccgttcgtggaaggtctggccgatatcgttgatatggccgcgattcagaaagcgggcctgacgctgggcgttgatccgctgggcggttccggtatcgaatactggaagcgtattggcgagtattacaacctcaacctgactatcgttaacgatcaggtcgatcaaaccttccgctttatgcaccttgataaagacggcgcgatccgtatggactgctcctccgagtgtgcgatggcgggcctgctggcactgcgtgataagttcgatctggcgtttgctaacgacccggattatgaccgtcacggtatcgtcactccggcaggtttgatgaatccgaaccactacctggcggtggcaatcaattacctgttccagcatcgtccgcagtggggcaaagatgttgccgtcggtaaaacgctggttagttctgcgatgatcgaccgtgtggtcaacgacttgggccgtaaactggtagaagtcccggtaggtttcaaatggtttgtcgatggtctgttcgacggcagcttcggctttggcggcgaagagagtgcaggggcttccttcctgcgtttcgacggcacgccgtggtccaccgacaaagacggcatcatcatgtgtctgctggcggcggaaatcaccgctgtcaccggtaagaacccgcaggaacactacaacgaactggcaaaacgctttggtgcgccgagctacaaccgtttgcaggcagctgcgacttccgcacaaaaagcggcgctgtctaagctgtctccggaaatggtgagcgccagcaccctggcaggtgacccgatcaccgcgcgcctgactgctgctccgggcaacggtgcttctattggcggtctgaaagtgatgactgacaacggctggttcgccgcgcgtccgagtggcacggaagacgcatataagatctactgcgaaagcttcctcggtgaagaacatcgcaagcagattgagaaagaagcggttgagattgttagcgaagttctgaaaaacgcgtaaacacatttaataaaaaaagggcggtcgcaagatcgcccttttttacgtatgacaaacacagaattgcctgatgcgctacgcttatcaggcctacgaggatggtgcaatatattgaatttaagcgattttgtaggccggataaggcgttcacgccgcatccggcaaaaacaacgaacactttgtcaacaaactgagtagctcaaggaaatcccaatgaagaccaacaggagtctggtcgtcatagtgagtctaattaccgccacattactgctgactgcatgcgcccaacctgaacaaagtagtttagctggcgactggttactgacccctaaagataaaaccagaggattaacgggtagcattgcggtaaatattgcacctttccggtgtaagacaaattgccgtggtgataacttacctgataatacccgccgctggcagttgagtggcgggaacgaaaaagaacttacttatcttcataatatgagtgcacaagaaaaggtcggtttaaatcccggttggcaatgctacaccagtttttttatgcgggtttgccagggcaagcccggcactcgaccgatagtcaatgaggattatgtcagcgaaagcggattttttggcagcatgatgcatgtcgggattattgagttacgacgctgccagagtgaaaattgccagcaagaattgaaagcgataaatacacattaaaatagtgagtccgggaatgaaacccggacctgaacatgtcttattgcgtgaatgtttctttcatttgatactgcatttcccagagttcagtaaggctaataacttttcttgttcttgcttcttcactttgtacccataagaaagggtagaacgtgaaggcttccgttgcgcttaattttattacgtcttctcgccattgctgccatcgtacattttcatagaaggtatctaaatcaccggataatgcccactgaagaaactcagaatatccaacttccagactttcccaattcagcgtatctggcgcaaaataataaacgcagccagtatcttccccaagatcgccaccattaagagcaaaaattacccctgcgacatcgtcagcgatgggtaaagcccgcacgcctgcgaattcagggcgttgtgtccaacttactggatctcgtggcaaccgggggtgaccagatcctgctatgcgtaattaaccattatcaatcagcagacctccggagccatagacaagcgcacccatcggactttttgttgtcacctgtaattgataaagtgcggtttcggctaaatctttattaaccggtaagagttcggtatggtttgtggcgtcttttaaccagttctggattattggccaggcactatcttcagtatttactaactgattcatttcacgcatcgctacttgctccttgtgtgctacggtgtcatttatgatgaggaattgtatggaacattttttaaatattaagttccttatatttgaataaaaaatgactttatccatacattgccacttttttcaaagcataaaccgatacccaataccggtttcagtaataaaatggcgaggccgggccggatcctgttccagtttttgtcgcagatgccccatataattacgcaaatagttgctgtgttcgatcgcgtttagaccctacatctgccggatgcggcataaataacgaactatttgccaacaaacagaaagggcgatcattcaatcgcccttttttactttgttttattaaccgtgtttatttttcagttcaaagcgtggacttaccagaccatacagtgtccaaccaaggaaggtcacgatggaaccgtacagcatggcttcttccccggaactgtacagcgcataaaagctatacatcgcgccaacaaaagcaacaaagtttgcaactttcgctttactggggggcacattagcgaccttctgaataatgactaatgccgccatactcagaatatacggaatgatattggtcaccacggccaggttaaccagcacgttgaactgactgtttaggctcgggctaatggtcatcagtgccaatccactctgaataatcacaatggtcaacattccctgcaccggtgcatccactttggttacacgggagaaaattttagggaagtagccttcatcagaactagatttaaacacctgggcaatggtgaactgccagccaagtaggctaccgcagcaggacatcaccatcagcgccataatgactttacccacttccggcgtgaacatctgcgcgaaggccagaccaaatggtgccgtactatttgccagctccatatttggcacaatcccggcaatcacgttggtggagacgatataaatcaccgccgcacctaacgtaccgccgagtaccgcgattggcacattacgttccgggttttccactacatcagtattcgcacacgcagactccagaccaagaaaagcccacagcgtcatagcgatggaagaacctaccgcactgaagaacggtgcatgatgcggattccaggaatcaacgtacagcgtcgggctaaaccagaaccagccaataatgcacagaccgacgaccggaataatgaccccccacacggtaatgctactgatttgcccggtaatgcgcgcaccaccaaagttagccacggtacaaatccacagcaccccgatggtcgcaagaccaatctgcactgggctcaaactcgcgccgagcagttcggtgccgtaaccaaccgcgctaatagcaatcgcgacgttagcaatcagcagactgacgccgtaggtatagttcgccataaagttaccggatttaccgaaagcatactcggcataaccgcccataccgccacttttacggctgaacataccgcattttgcgaatgcccatgccagtgccatactgcctacggctgtcaccagccaggagataatactgattgtcccgacttcggcaagctttgtcggcagcatgatgataccggagcccatcatgttgaccatcgtcagtatggttaactgaacgacgcccattttgttgcttttagcctgactcataatttttcccctttcaacagggtgctttgcgcatcacgaggcttgatgacatagcaccaaacttgcttacgaccatcatgttcttcgatatagacaccctgcagctccggtgcaaaacctggcagcaggttgatcccttcttccagagcgctgaagtaacgcagaacagcaccaccccagatttcacccggaacaacacacagcacacccggaggataaggaagcgcaccttcggcagcgatacggccttctgcatccggcagacgaaccagttccacttcaccgcgtaaataggcgtagttggcttcttgcggattcatgctgacgcgtgggaagtgctccttacggaacatctctttttgcagttgtttcacgttgtggcgggcatacaaatcatgcatttcctgacacaactgacgcagggtataaccggcgtagcgctcttcatgctgtttgtagatggaaggtagcacttctgctaatggcgcgtcggactcaagcagtttttcgaagcgtaccagcagggcaacaagttgctgaagtttggccatatcttctgccggagtcagcaggaagaggatggagttaagatcgcatttttccggcactacgccattttcgcgcaggaagttagcaagaatcgtcgcgggtacaccgaacgcttcatattcgccgttacgtgcatcaatacctggggttgtcagcaacagtttgcatggatcgacaaagtattgattctctgcatagccttcaaaagaatgccagtgttcccctggtacaaactggaagaagcgcagatcaaccgcaatttgcgctgtttcatagctctgccagggtttaccatccaccagttcaggtacgaacggacgaatatgctgacagttatcgaggatcagtttgcgggcattaatgccatttaccacacaatccatccacatattacgaccgctgacaccttcatgcattttggcgttgatattcagtgcggcaaacagcggatagaacgggctggtggaggcgtgcatcataaaggcgttgttcatgcgtttgtgcggtacataacgctgttgccctttgatgtggctgtcttttttatgaatttgactagtctgagaaaaaccagcctgttgtttatgcacagattgcgtaaccagaatacccggatcgttctcattaagatccagcaacagcgggctacagtccgccatcatcggaataaactgttcatagccgacccatgcactgtcaaacaggatgtagtcacacagatgaccaattttatccaccacttggcgggcgttataaatcgtaccgtcgtaggtgcctaactgaatcacagcgaggcggaaaggacgagcctcttttgcccgctgcggtgcgacttccgcgatcagctcacgcaggtaactttcttcaaaacagtgcgcatcaatgccaccgataaagccatacgggttacgtgccgtttccagataaaccggtgttgcaccagcctgtagcaacgctccgtggtggttagatttgtggttattgcgatcaaacagcaccagatcacccggtgttagcagggcgtttaaaaccactttgttagaagaactagtgccatttaaaacgaagtaggttttatcggcattaaacacttttgccgcatgttgctgtgcaatgcatggcgcgccttcgtgaatcagcagatcgcccatcgctacgtcggcgttgcacaagtcggcacggaacagcgcctcaccaaagtattccacaaactgattccccgccggatggcgacggaaaaattcgccgccctgatgaccagggcaatcaaacgcgctgttaccttgattgacataatcgaccagtgcgcggaagaaaggtgggcgcagttgagtttcataatggctggcagcggtttctaactggcgaccataaaattctcgtcggctttcgcaattctcaaagacaccgctaatacggggcaaatactctgcgggtacacgttcttgattttcagtagcaataaataccgggatgccataacccgtggcatcgatttcatcgagttttccgcatgtaacatcgttgaggcttaaaactattgccgccacatcgatattacgactttcattaatgtagatacattctcgctgcgtggtaaaacagtccgggcaagaatcactaaccgcaatttttaatttactcatttttcatctctttattttaggtaatagcaggtcctcaatttctcgaatgagaaatcgatcgtgccggaaaaaagcaaagttaccccgctgataaataaatcaggtagattgcttttttcagaatgcagaaacccttaccagtcaggtggctgataatacaagggttaacagagaatgagcactgcggaatacaggcatatgcctgtaatacagagagtcaggaagacctgtacgctgaagtgcccttagtcggtagactaacgggcattgaagaagtgaaagtcgaagctattgcgatgagcaaacttcataatatgagttgtccgccttatatggggcatagtgcggctgttattttccatttaatttacctttcctgatgtgaatgaaggtgaagatattctatccaggaaatacggttgaactgtgaaggtgatcaataaaaaatgatcaatcttaatttatttaatgatgagctttttactcagtaatataaaatattgaattgttatttttgtgtgttgtttaagataaaaagccgtatttattattacggctttaattaataaaaggcaggctgtattaaaattaatattcaaagcataaaccgatagccaataccggtttcagtaatgaaatggcgtgggcgggcgggatcctgttccagtttttgtcgcagatgtcccatataaatacgcaaatagtgactgtgttcgaccgcgtttggcccccacacctggttaaggagctggcgctgggtgagtacttttccggcattgttgagcagcaccgccagcaggcggaactcaattggtgtgagatgcacctcttcctcaccccggtgaatcacgcgggcggctaaatcgacggtaacatcggaaaattttaccagcggatcgggcgcggtggtggcagagtggcggcgtaatgcgacgcgcagacgggcctgcaattcgccaatgccaaacggcttactcagataatcatccgctccggcatccagcgcggcgattttgtcgctctcttcgctgcgtgcggaaagcacaatcaccggcaccgcgctccactggcgcaggtcgcggataaactcaatcccatcaccatcgggcaggccgagatcgagaataatcaaatctggcttacgggttgccgcttccagcaagccgcgttgcagcgtttcggcctcaaagacgcgcatcccgtcgccctccagcgccgtgcgcagaaagcgacgaatagcctgttcatcttcaacaatcagaacgtttgtcacatatcctcatgaaattcttcaagttcaggggcagtttgctggggaagtgtaacacgaaaacaggcaccaccttccggtcggttgaacgcggtaatagtgcccccgtgtacatccactatcgcccgacaaattgccagtccaagccctacccccggtactgcgctctctttattcccgcgagcaaacttatcaaatatcgtctgctcctggcctggcggaagaccggggccgttatcccagacatccagttgtagattttcgccctcaacgtgggcatcgataccaatttcggcctgcgcacccgcatatttcaccgcgttctccagcagattaatcagcacccgttcaaagagtggcccgtcaacgtggattaaggtcagcggttctggcagagaaagattgatggggctgcttaaacccggttccagcatttgcagcgcgctgccgactacttcttccagcgttaaccactctttcttcaaattaaagccgccggactgaattcgcgccatatccagtagattattcaccagtcgggtagtgttcagcacatgctgacggatctcgctggcctggcgggcgtggggacttccttcgcttgccagatcgagcgttaagatttctgcctgaccaaacagcaccgtaagcggcgtgcgtaaatcatggctaagcgccgccagcagggcgttgcggatctgttcacgttcgcttgccatccgcgcctgttcttcgctggcggttagcgtcagccgctcaagggcattggcgactaacagcgtaaacgtctccagcaggcgctgctgttccgggatcatcaactggcgcagattccccggctccaccaccaccagcccgtaggttttctcgccgctttttagcggcaaaatctggtacggtacaccgggtaacgtgtcggtgcccgcgcccgcaggcaggcctttatcaaaactccactgcgcgatggcatcgtcccacggcgtcattccttgcggatgtgttaacggctgcaatttaccgttgtcatcgggcaacaacacctgactgcgggcatgaaacgtggaggcaataaattgttcgctggtggcagcgatatcctgcggactgcggcccaccgccagagctttgctcatttcatataagtgccgtgtgcgttgctcgcggtaacgggctacccgcgcctgataacgcacgccagcagtaaggttcccgatcaccagcccgacggttaacatcaccgcgaaggtcagcagatattacacatcagagacggcgagcgtgccgcgtggggcgataaaaaagagatcgaaactcactacattaatgacggtggcaaccacactaggccagcgtccataaaatagcgccaccaccaccacgccaagcagatacagcatcaccaggttggcggcatcaaacgccatcagccactgcatggcaattaaggtgataacggcgcataacgcggcggcaaccacgcatccctgaatttgtacacgccacttgtctttaaaagagcggttatccggcgcgttgttaatcgtgcgggcgggtggttcatcaagcgcgaccagcacctgatcgagatcgggggcgatgcgcgccagtcggtcagcaaacgtttcccgacgccaccagcggcggctggccgggcgaccgagaataatcttgccgagattatgttcacgggcataacgcactaccgctttctcttccgctggatcagaaagtgttgccgtctccgcgcccagttcctgcgccagacgtaaggcgctgagaattgcccgacgttttttttccggtaagcggtgcagggcaggggtttcaacatacaccgcgtgccagacgctacccagccgactcgccagccgcgccgctgcgcggaccagtttttcgctgccggtgttatggccgatgcataaaaggatcgcgtcgcgcgtgcgccacactttctcttcgccaggatgcccccgccaggcgcgcatttgctcatcaacgcgatcggcagtacggcgcagtgccagttcgcgcagggcgatcagattacctttgcggaaaaaatgttcaatggcgcgctccgcctgcccggcaatatagactttgccttctttcagccgctggcgcagatcgtccgggggcaagtccaccagcaccacgtcgtcggcggcatcgaaaaaaggatcgggcacggtttcccgtacctgaattccggtgacgccgctgaccacatcattcagactttccagatgctgaacgttgacggtagtgaaaacatcaatgccagcttccagcagttcttcgatatcctgccagcgtttgggatgacgggaacctggcgcattactgtgcgccagttcgtccattaagatcagcgccgggcggcgggcgagggcggcatcgagatcaaactcgctgatatgccgcccacggtacgcctggcgttttaacggcagaacagccagcccttccagcatggcggcggtatcttttcgcccgtgggtttctaccacgccaaccacaatatccagcccttgcgcccgcagtcgctgggcttctgccagcatcgcccaggtcttcccgacgcctgcacaggcaccgaagaaaactttcagcttcccccgatgcggcgcggcagtttgttccagcagacgatcggggtcgggacgtaagggttcgttattcatcaagtttatccagcgccagattgagttcaacaatgttgacaaccggctggccgatatatttcaccagcggttgttggctgtattttgcgatcagttgcgtgagctgttcaacgctgagattacgcgctttcgccacgcgtgggatttgccaggccgccgcttgcggggtgatattattgtccagcccgcttgcgcttgccgtcaccagttcaaccggaacgctcgcgctggcatccgggttagcggcccgtaatgcagcaacgcgtgcggctattagtttatccagctcagggttactgaccgccagattgctcccgccagaagcctgtggattatagggcatttctgccgttgcgctcgggcgaccatgaaaatagccgttgccggtaaaattctgcccgattaatgcgctaccgcgcaccgtatcaccttcacgaatcaagctaccattggcctgccagggaaaccaccattgccccagtacggtggtcagcagcgggtaaacgccgccagtaatcaataacagaaagataaatgtacttaatgccggacgtaatccactcatggtaaacctcacaccagaccgcaaacggtcagcagtaaatcaatgactttgataccgataaacggcaccagcagcccacccagaccgtaaatccataagttacggcgcaacatggcagaagcggtaagcggtttataactcacgccttttaacgccaggggaatcaaaaagacgataatcaaggcgttgaaaatcaccgcactgaggattgcggagtcggggctatgcaggcacatgatgttcagcgcatttaactgcggatacgttgccgcgaatgccgccggaataatggcgaagtatttcgccacatcgttggcaatgctgaaggtggtcaggctgccacgggtcatcagcatctgtttgccaatgtgcaccacctcgatcaacttggtcgggttagagtcgagatcgaccatattgcccgcctctttcgccgcctgggtgccggagttcatcgccaccgcgacatctgcctgcgccagcgccggagcatcgttggtgccgtcgccggtcatcgctaccaaacgaccttccgcctgatactgacggatcaatgccagcttggcctccggtgtcgcttcggcgagaaaatcatcgacacccgcttccgcagcaatcgcggcggcagtcagacggttatcgccggtaatcatcaccgttttaatgcccattttgcgcagctgggcgaagcgctctttaataccgcctttgacgatatctttcagcgcaataacgcccagcacacgagaaccttccaccaccaccagcggcgtggctccctgacgcgcaacctgatcgactttttgatcaacatcggtagggaagtgaccaccgttagcctcaacatggcgacgaatggcatcgacagaacctttacggatcatgcggttgtcgatgttgatcccgctcatccggctttgcgcagtaaacggtacaaaggtggcatggaggctctgcacatcgcgctcgcgcaggttaaaacgctgcttggcgaggatcacaatactgcggccttccggcgtttcatcagccaggctagccagttgtgcggcgtcagccagcgttttttcatccacgccctgcgcggggataaactcgctcgcctgacggttaccgagtgtgatggtgccggttttatccagtagcagaacgtcaacgtcacctgccgcttcaactgcacgtccgctggtggcaatcacattcgcgcctagcatccggctcatcccggcgacgccgatcgcactcaacaggccgccaatagtggttgggatcagacagaccagcagcgccaccagtaccgttacgctgactgcattaccgccccacgcggaaaacggccacagcgtggcggttgccagtaaaaagacgatagtcagggcaatcagcagaatggtcagggcaatttcgttcggcgttttgcgtcgctgtgcgccttccaccatcgcgaacatccgatccagaaatgtctcgccggggttaacgctacactcaatcaccagccagtcagaaagaatacgcgtgccgccggtgacggaggcaaaatcgccgccggattcacggatcaccggtgcgctttccccggtgatggcgctttcatcgacgcttgcacccccttcaataacttcaccatcgcaggggataatatcgccagcttctaccagtacgatatcgcctttacgaagttggtcggcaggaactttgtccgccgcagcgccatatttcggctcacgcagcttgcgggcaaaggcagtttttttcacccctttcagactgttggcctgcgctttactgcggccttctgccagcgcctcggcgaaattagcgaacagtacggtgatccacagccaaccgctaatggccgcgctaaacagcgcattgccgggcatcgcaccgcttgccatcgcgatgctaatacaggtggtcagcagactgccgatccagacgataaacatcaccggattgcgccattgcgcctgcgggtttaattttttcaccgcttctttcagcgcctgaacgacaagtgttggttcgaatagcgccagttgtttacgactcatattcagtgctcactcaatatcatcaggagagatattccgccaccggaccaagcgccagggcagggataaaggtcagtgcgccaaccagcaacacggtgccgattaacaggccaacaaacagcgggccgtgcgttggcagcgtgccggagctggcggcttggctctttttactcaccaggctaccggcaattgccatcaccgggataatcaccccgaagcgaccgacaaacatgcagaacgccagtaaacagttccagaacggagagttggcgcttaatccggcaaaggcgctgccgttgttgttagcggcggaactcacggcgtacagcacttcgctaaaaccatgcgggccagggttgagcatggcgctacgtccggcgtcggtcatcatcgccaacgccgcgcccatcagcaccagcgtcggggtaaccagaattgccagtgcagtcagtttcatctcgcgtacgtcgatttttttacccagatattccggtgtacgaccaatcatcagcccggcaataaacaccgccagcaggacaaacagcatcatgccgtaaagaccagaaccgacaccgccgaacaccacttcaccaatttgcatcagccacatcggcaccatgccaccgagagcggtaaagctatcatgcatcgcaatcaccgcgccacaggaagccgccgtcgtcacgaccgcaaacaggctactgaccagcacgccgaaacggctctctttaccttccatattgatgctgctgtccgtgcccagtgccagcagatgaggattaccctgaacttctgcccacatcaccacgcctacgcagatgacaaaaatcacactcatcgcccacagcaacatgcgcccctggcggcgatcgcccatcacttcaccaaaggcaaagcacagcgccgttgggatcaagaagatcgccagcatctgcacgaagttggtcagtgcggttgggttttcaaacggatggctgctgttggcattaaagaagccaccgccgttagtaccgagcatcttgatcgcttcctgagaagctacaggccccatgggtaacagctgttgcgctccttcaacggtattcacagcctgataaggcagaaagttttgcagcgcaccttgttgaataaaaaacagtgcaatcaacaacgccacagggactagcacccataacgtgatgcgtagcagatcgacccaggcattcccgagcgtgctcatgctctggcgggtaaacgcacggatgagggcaaaaatcaccgcaatcccgctggcggcagaaagaaagttttgcaccgttaagcccgccatctggctgaaatagctcaacgtggtttcaccgctataagattgccagttggtattggtgacaaagctgacggcggtattcagcgccagatcccagctcagccctggcaactgctgtggattaagcggcagatagtgctgaccgagcaacataaaaaacagcaccgccagccccagcatgttcaggccgagaatggcacaaagatattgcttccagttcatctcacggtcagagacgccaagtgcgcgaaaaagtacgcgctcaacgcccgttgtaccgggaagaggaatgtcattaatcagccgcgccagcccgctgcctaaaggacgcgccagcaccattaacaccagtaaaaacgtggcgatcagtaagaacccttgcgcagccatcagaacgcctccgcattgatcagggcataaaccagataacccagtaataaaaacaccagcaatacgccggttatcacgcctgcactcacagtgcacctccagtggcctaaaagtgataccggaagggtagaattctggctgcaaagatttcgcaaaaatctgcgggcggggtgtaaaaaaagtataaaaatggcaaaagccatgatttaactaatgtttagtattaatttaacttttgtgtaacttaattacaggatgaatgtaaataaaccatcaataagcaaaaataagtggtcggatgagtagtaaaattacacaaaaggcggtactattttcatcagataaacaaattcatttttccggtgccattcaccgggtagatacaaaagggggagaaaagtatggaactctacagagaatatcctgcatggcttatctttttacgccgtacttatgcggttgcagcgggcgttctggcgctgcctttcatgcttttctggaaagaccgcgcccgcttttacagctacctgcatcgcgtctggagcaaaaccagcgataaaccggtgtggatggatcaggccgaaaaggcaactggtgatttttattgattgctgagttttgaatacattgaacgtctacacttactcctgtaaaccgctcaggagcagtaatgaatctacaacgatttgatgacagcaccctaatccgtatctttgcccttcatgagttacatcgactgaaagaacatggcttaacgcgcggggcgcttctcgattatcacagccgctataaactcgtctttctggcgcattctcagccggagtaccgcaaacttggcccgttcgtggctgatattcaccagtggcaaaatctggatgactattacaaccagtaccgccaacgcgtagttgttttgctttctcaccccgccaacccgcgcgatcacaccaatgttttgatgcacgttcagggttattttcgcccgcatattgattccacagaacgccagcagctggctgcgcttatcgacagttatcgccgtggcgagcaaccacttcttgcgccgctgatgcgtatcaaacactatatggcgctttatcctgacgcctggcttagtgggcagcgttatttcgaactttggccgcgtgtgattaacttgcgccatagtggagttttatgactacccatctggtctggtttcgccaggatttacgtctgcacgataatctcgcactggctgccgcctgccgcaatagctctgcacgcgtgctggcgttgtatatcgctacaccacgccagtgggcgacgcataacatgagcccgcgtcaggctgaacttatcaatgctcaactgaatgggctacaaatagcgcttgcggaaaaaggtattcctttattgttccgtgaagtggatgactttgtcgccagtgtcgaaatagttaaacaggtgtgcgcggaaaacagcgttacccacctgttttataactatcagtatgaagtgaatgagcgggcgcgggatgtggaagttgaaagagcgctgcgtaacgtggtgtgtgaaggatttgatgacagcgtgatcctgccgcctggcgcggtgatgaccggtaatcacgagatgtacaaagtctttacgccttttaagaatgcctggctgaaacggctgcgggaagggatgccggagtgcgtcgctgcgccaaaagttcgtagtagcggaagcatagagcccagcccatccattacgctgaattatcctcgtcagtctttcgatactgcgcattttccggtggaagaaaaagcggcgattgcgcaattacgccagttttgccagaacggtgccggagaatatgagcaacaacgagattttccggcagtggaaggcaccagccgtttgagcgccagcctggcaacgggcgggttaagccctcgccagtgcttgcatcgcttgttggctgaacagccgcaggcgctggacggtggggccggtagtgtctggcttaatgagctgatctggcgcgagttttaccgtcacctgataacgtatcaccccagcttgtgtaaacatcgtccatttattgcctggacggatcgtgtacagtggcagagcaatcccgcacatttacaggcctggcaggaaggcaaaacgggatacccgattgttgatgccgctatgcgtcagcttaacagcactggctggatgcataacaggctacggatgattacagccagttttctggtgaaagatttattgatcgactggcgcgaaggcgagcgatatttcatgagccagctgattgatggtgatttggcagccaataacggtggctggcagtgggccgctagtaccggaaccgatgcagcgccgtattttcgtattttcaacccgacaacccagggcgagaaatttgatcatgagggcgagtttatccgccagtggctaccggaactgcgcgatgtgccagggaaagtggtgcatgagccgtggaagtgggcgcagaaagcaggtgtgacgctggattatccgcaaccgatagtcgagcacaaagaagcgagagtacaaacgttggcagcgtatgaggcggcgcggaaggggaaataacagacgcgtcaggcaatcgagcccagatgccggatgcggcgtgaacgccttatccagcctacaaatttgtgcaaattcaataaattgcaggaaatacgtaggcctgataagacgcgtcaagcgtcgcatcaggcatcggtgctggcctattaagactccagcgccagcgcgcggtttctgaatttcagcgcctgatacagccaaatcatcagtaccagtcctacacacgccagtgcgccccaggtaatttgatcaaatacttcaatatatgcattgatggagtagttgatcgccccggaagcatcaaagctagcctggcttgtctgatcggcaatcacgcccgccagatagttcgcgatcgcgccagaaagcagcatgtagatgccggttaatacgccggtcacaccggggatttcaatgcgcgtaatttggctcatggcaaccgggtcgataaacagttccgcaaagcccatcaccgccaggcctaataccatcagtggcagagaagagtgaccatacattgcggaccagcgggcgcttaaggtcagaatgcagaatccggcgctcatcaggccaaggccaagagcaaatttcccccagatgcgcacggtacgattacccgcgacactctcttttaccacccacgccaggaacacaccgcacagcataactgcgaaggcattaatgctctggaacatcgcggtcggaacggtataaccaaacatatcgcggttaacgaagcggtcgatataaaggctaatgctgctaccgccctgttgtgcgaaggcccagaacaacatactgaagaaggtgagcgtcacaatcagccccagctccttccgctgtttctggttttctgctttgcgataaatttttgccagtacacccaggccaataatagtcgcgacaattaaggcgtatacgctccactctttccagaacagtatggtaatcagtgcaggcgttgccaccagcagaaccagcagccatccccagttcggcaggagaaagtttgtcgcacgcagtacttttttgttaacgccgcgggtatgagtgaaatgacgattgccacataagaaaatgaccagacccgcgatcatgccaaccgccgccaggccaaagcccatcgcccagctgtactcttcctgggcgtaaccacaggcgataggtgcgataatagaccccacgttacccgccgcatacatcaggctgaaaccgccatcacgacgcggatcggttggctcatacagctcgccgagcagacagcttacgttagatttaaacaggccatagccgcagacgataatcgccagggacagatagaggaaactcggatggatctcactggcacccagcaccacatgaccgatcgccatcaacaacgcccccagcatcaccgccatgcgattgccgagaactttatccgccaaaaagccaccgaggattggcgtgacatacaccaggctacagtaggcgctaaataactcgtaggcgtgagtatcgttgtattttagttgattggtgagatagagaatcagcagggcacgcatgccgtaaaagctaaaatattcccagatttgcagcgcaacgacatagtaaatagcgcgcggctgacttgcgtgtttattcataataattccacaattgacggcaacgtcacgtaatagttgcgcggcgtgcttgtgtttccttaaagttaaaactttgatacagatctgattatttatgcaatatgctgtctgattgcataaatatacattagctgaagcgtgatgatataaacaatttgcgtcttttggcgtcgggtttgtttcttaatatgtcaaaagattggctatcgacgaactggcgaggtaacgctatgttaacggtgtagctatcagaatacggaaggcgcgaagatgaaaaacaccgaactggaacaactgattaacgaaaaactgaacagcgcggcgattagtgattacgcgccgaatggtttgcaggtggaaggcaaagagacggtgcaaaaaattgttaccggtgtcaccgccagccaggctttgctcgatgaggcagtgcgtctgggcgcggatgcggtcattgtgcatcatggctacttctggaaaggagagtctccggtcattcgcggaatgaagcgtaaccgtttaaaaacgttgctggcgaatgatatcaacctgtatggctggcatttgccgcttgacgcacatcctgagctgggcaataacgcacagctggcggcgttactggggatcacggtcatgggcgaaattgagccgttggtgccgtggggcgaactgaccatgcctgtgccgggactggagctggcttcctggattgaagcgcgtctgggacgtaagccgttatggtgtggcgataccggacctgaggtggtccagcgcgtcgcctggtgcacgggcggcgggcaaagttttatcgatagcgccgcgcgttttggcgtggatgcttttattactggcgaagtttctgaacagaccattcatagtgcccgcgagcagggattgcatttttatgctgcaggtcaccatgccactgaacgtggtggtattcgcgcattgagcgagtggctgaatgaaaataccgatcttgatgtgacctttattgatattcctaatcctgcataacgaataatcagagggatcgaaagtgcaacgagcgcgttgttatctgataggtgaaacggcggtagtgctggaactggaaccgccggtgacgctggctagccagaaacggatctggcgactggcgcagcgtctggtggatatgccgaatgtggttgaagccattcccggcatgaacaatatcacggtgattttgcgtaatcctgagagcctggcgctggatgccatagagcgtttgcaacgctggtgggaggagagcgaggcgctggagccggagtctcgctttattgaaattccggtggtttacggtggtgcaggcggaccggatttggcggtggtcgcggcgcattgcgggttgagcgaaaaacaggttgttgaattgcactcctccgtggaatacgtggtctggtttttaggttttcaaccgggcttcccgtatctcgggagtttgccggaacaactacacacgccacggcgcgctgaaccgcgcttactcgttccggcaggttctgtcgggatcggcgggccgcagactggtgtttatccgctggcaacgccgggtggctggcagttgattggtcataccagtctcagcctgtttgatccggcgcgtgacgaacccatcttattacgtccgggagacagcgtgcgctttgtaccgcagaaggagggagtatgctgaagattattcgtgcgggcatgtataccactgtgcaggatggcggtcgtcacggttttcgccagagcggtatcagccactgcggcgcactggatatgcccgcgttacgcattgctaacctactggtgggtaatgacgccaatgcccccgcgctggagatcacgctcggtcagttaactgttgagttcgaaactgatgggtggtttgctctgacgggtgccggttgcgaagcgcggctggatgataatgccgtctggaccggctggcgattgccgatgaaagcaggccagcgtttaacgcttaaacgcccgcagcacgggatgcgcagttatctggcggtcgcgggtggtattgatgttccgccggtaatgggcagttgcagcaccgatctcaaagtggggattggcgggctggaaggccgtttactgaaggatggtgaccgactcccgattggcaaaagcaagcgtgattctatggaagcgcagggcgttaaacagctgctgtggggcaaccgcattcgcgccttgccggggccggaatatcatgagttcgatcgcgccagccaggatgcattctggcgtagcccctggcagcttagcagccaaagtaaccgcatgggctatcgcttacaggggcaaattttaaaacgcaccaccgatcgcgaactgttatctcacggtttgttaccgggcgtggtgcaggtgccacataacgggcagccgattgtgttgatgaacgacgcacagaccaccggtggttacccgcgtattgcctgtatcattgaggctgatatgtaccatctggcgcaaattccgctcggtcagccgattcattttgtccagtgtagtctggaagaggcactaaaagcacggcaagatcagcaacgttattttgaacaattagcgtggcggctgcacaatgaaaattgacctgaacgccgatctgggcgaaggctgcgccagcgacgcagagctattaacgctggtttcctctgccaatattgcctgtggatttcatgcaggcgatgcgcaaatcatgcaggcttgcgtgcgtgaagcaataaaaaatggtgtcgcgattggcgctcacccgagttttcccgacagggaaaattttggtcgcagcgccatgcagctgccgccagaaaccgtttacgcccagacgctgtatcaaattggcgcgctggcaacgattgcccgtgcgcaaggcggcgtaatgcgtcatgtcaaaccgcacggcatgttgtacaaccaggcggcgaaagaagcacaactggcagacgccatcgccagagcggtatacgcttgcgatccagcattgattctcgtcgggctggcgggaagcgagctgattcgtgcaggcaagcaatatggtctgacaacgcgcgaggaagtgtttgccgatcgcggttatcaggctgacggcagcctggtgccgcgaagccagagtggcgcgttgattgaaaacgaagaacaggcgctggcgcaaacgctggagatggtgcaacacggcagagtcaaaagtatcaccggcgaatgggcaacggtcgcggcgcaaacggtctgcctgcatggcgacggcgagcacgcactggcgttcgcccgccgactacgctctgcatttgccgaaaaggggattgttgtcgcagcataaccccgattaataaagaatgaaaaaaggatatcaccatgcctgaaggcccggagatccgccgtgcagcggataacctggaggcggcgatcaaaggcaaaccactaactgatgtctggtttgccttcccgcagttaaaaccttatcaaagtcaacttatcggtcaacacgttacccatgtggaaacgcgtggtaaggcgttgttaactcatttttccaacgacttaacgctctacagccataatcagctttacggcgtctggcgcgtggttgataccggcgaagagccgcagaccacgcgagtattgcgggtaaaactgcaaacggctgacaaaaccattctgctttatagcgccagcgatattgagatgttgaccccggaacaactgaccacgcatccgtttttacaacgcgttggtcccgatgtgctggatccgaatctgacgccggaggtggtgaaagaacgattattgagcccgcgctttcgtaaccgtcagtttgctggattactgctcgatcaggcgtttctggctgggcttggcaattatttgcgggtggagatcctctggcaggttgggttgactggaaatcataaagcgaaagatctcaatgcggcgcaactggatgcactcgcacacgcgttactggagattcctcgattttcctacgctacgcgggggcaggtggatgagaataagcatcatggggcgctgtttcgctttaaggtttttcatcgagatggcgaaccgtgcgaacgttgtggcagcatcattgagaaaaccacgctgagttctcgcccgttttactggtgccctggctgccagcattaagcgctccgcttcggcgcataggtactaataaaccgcgcaatggcaggccctgtcagcaaaatactgaacaggcgtagggtttgcatcgccataatgagcgccatatcggcattgctccctgcggcgatgaccgccacggtatcaagcccgccggggctggtggcgaggtaggcagtcataaaatcaatgtgcataaaccgggtcagcccccacgccatacccgcacaaatagccagcagagcaaaaatgctcagcaggatttgcggtagcgggcgtagtgcccgcagtaagatttgtttatcgaaaccaagaccaatccgccagccaattgccatatacgccatcgccagcagccattccggtagttcgatggtgatgagctgaccagactggagcactgcgcccgccagcatcgggatgagcatcgtgccggaaggaagacgcagcaggcatcccactgtaccggcaacgaccgcgagcaaaatagtaagcaggagattaatgctcactggcgggaaccagacgatatgctggttaaccgcttcagcgttatcgcccagcatcatgcgggtgaccagaacagcggcccccgcgacgaacagcactcgcagatattgcataaacgccaccaggcgaatatctgcgccgtaatcttgcgccatagcgaccattgccgccgcgccgccaggagaggagccccaggcaccggtatttccaggcaaactgctatagcgcaccaataaccaacccacaatggcgctggaaagcagcgttaccagtaaaattgcaagcacgatcggccagttgacggccagggtggtgagaatgctaccagtgaggttttgcgcaatcatgcagccaagaatggcctgggcggcgagaaaagcagagcggggaagttgcagagtaattccgcgcatactaaagatgatcccggcgatcatcggcccaagtaatagcgccgccgggagatgtaccgcgaggaaaccaatagaaaggagaagacttagcacacataacattccccactgcaaaactggcatccttcgctccctcattattttctctttggtgtatcgatacagcataaagaaagctgggccaggaaaaaataacagcaatcaaggaaaaggggaaaatcagcaattttctgaaagagatgccctttccggcggcaaagggcatcatggtaaatcagttatagttaatcttaaaaagcaccactgtatcgaaggggccagcctcgatgggggtgcctggaatggagctaagttcagccgtataggttttttcgtagaccaacatgtcactggtgaaatcggcgtattcagcatatttattgaaggtataagggctggcgttttcatccagtaaacgtagcttcagaccattaccaatcaacaatgctttatcttcttcaaccaacgtttcttcggtataaaaggaggaactgactttaaatccgtcggtgcattgatcgttttggctcttggtcgttttaatactgaacgttttgctcattgtgtggcgacgtatatccagcaaattaaatttaccaaaatcaatcacctgtgtttccggactaatggaaaaattgacgctgcaatccagcacgcgaatgttttccagaccagtaatatgatatttcaggttttgggcagtagggtcttcgttaacgctaccggcaccgtcaaattgcacgacgatatagtcgctaagcgtactttgataatcatgcggcggcatttctcgtattttgacgtataaccgcatgcgagcgagaaaggtacggctcatatgaatattagcgggatcgccgctgcaaattttgttctgccatcccatcgcgatgatctgctcaggggtataaatatcaatgttcttactgtcgatacactggttagtgtcgatgcgactttttcccagactggcatcgtaatcgacaccgttgtatgtcacgccgagttgataataacgatcctgcacccccggataggggtttacccaggcgtagacatgctcgctttcaaagttgccgttggtattgttgtcacaatagacgggaattttaatatcgtcagattcccagatcttatcaccgggtttggcattgcctggtacagcaaacggttgaatcgcttcacttttttctactgcgccaccagatgtaccaaaatagcagttcagcgccattgcagacttcaacggcagaaataacaggcagatgacgagcaacaatcccttgccagcactcatttcgcctccactgcttgtaaacggcattgtccgctgcagttgagcgtcgtcatgcgtaatgcgccgtaatcatccatgtaaccgagataaaactggctgccgctataacttccggtgtttgtgttgaccgtactaaaaggtgcaaccatcacggttttgaagcctgggagaacgcctttttcatttctccccagataggcaatggtcagataatacgcggtaggatttttcagtgtcagttggttgccctgctggctgacctgtaactgcagttcgaccttttctcctgctttcttgcgtaatgcagccggtcgccagaacaatttaatacgactttgaatagcgacctgaagtatcgcatggtcgctgcttttatccggagcgggaggaatttcgcgcatattgtagaaaaatagcgtttcgcgatcgccaggtaattgtgtggtactggcttgtttcacaacccgcacctggcttgtcgctttcggttccagacgttgaatagggggcaaagcgaccagaagagcatcgcttttctcccctttttcattttctatccaggaataagcaagataaggcagtttgtcactttggttttcgatacgcaggctggtggctttgtcattggcgttaaacacaatgcgtgtgcgatcgggttgcaccgcagcattgcaacccaagctgatggttaacaacattaagggtaatcctttaataaatgtcattctcttttccttaattaatgacaaggtaaaatcaggcgtttggtcgtgtcttccagacgttctggcagatgaataatgcagctttgctcaccccagaccacggtaaacagttgattttcagcgacaccgcttaaccaggcatgtccttcctcgccaaccatacccacgctaatgccgctgtcatcctggcggatatccgcaccgaggggagggaactgaccgctggcgttgcgtatgatgacgttaacgtctttaccggaacgggaagccagacttttgtaacctatcgcgccttcaatccatgtttccttgatgacgttttctgcaactgttacgccgtcgggtaagtcattcatgttcaccgccacggtggaaggctggtaactggaaatcaacggcaccaccgcaatgccaaaatggttggtgtagtcgagattgccctgaaccggaatatctgccacgccatcggtgctgaccatcaggcgtggttcattggtggagctgcggcgatgaaatgctgcaccatattgggttgcggtgaaagaaccgctccagctgctgctgacggaactgtaatcactggcggcataggtaccagaaatatcccactcacccgcactactcaggtgctgatagttaccgctcacctgggctccattgtccggacgatcggattgcagtccggcagacatgccccagctattacgttcatccagcgtatcgttccagctcatgcggtgtatggtgctgtggctactgttttgcatgtcatagccaacccgaccaccgttaccgaaggggaggctaatgctcagataaatctggttgtcgcgatctttatcttcgtagtgggtcgtattgaaactcgtgctaatgctgatatctctccagtcaccaatatcaacattaaaacctgctgtgatgttggcggtcgtggaggcgtctgcattccaccaggtttgatgtagcaggttggcgtaaagattgaggtttagtggggtaatcggttggcccacggataagctgatcgtctgtttttcgtcctgcgcatcgctgtcgttgtatttgtgatccagatagttggcgtagctgtgaaaatgacgatcactgaagcgataagcggcgaggctaatcgtgctgttggtggcatccacttgtttgctgtaattaaaacggtagcttaagccccgctcgtcctgctgagtatcaaaatggctactggcccaggtgacatcaaaggacagtgcgccaagccacagcatattttgcccgatacccattgcggcagaatggtagtcatcatcagaaatcagcaggccgccgtacaggctggtgttactgagcatcccccaggaaacttcattgctaaaaaaggtttcattttcagtttgatgactcatggaaggccgtggctgacccgcggccaatttatagcgaacctgtccctggcgagtcaggaagggcgtgcttgctgcgctaacctggaaattgttcacccgaccatcttcttccgtcactttgacatccagcgtgccctgaacagactgattgaggtcatcaataataaacgggcctggcgggacttttttctggtaaatgacgcggccactttgactgatcgtcaccgtggcattggtctgtgcaataccgctaatttgtggggcgtagccacgcagctcccacggtaacattcgatcgtcactcgccagtgccgcgccggtataagaaaaaccatcgaaaatattggaactgaaatcggtttcgccgagggttaacttagagcctaattgcggtaatggacgaaaaagataggtgcggcttattccgccactctggtcatggttatcttcgctatcggtcttattaagctggtaatcactgcgtaagcgccatgccccggcgttaattccggcggtaccgtaggcattcaggttagtgctgctgctgccgtcctgtgggcggtagctgctggcaaacaagttgtaatccatcaggacaccggcaacaccttctttccatgtagaggggggagcccagttttcactgtgccacgccagccaggcttgcggaatactaatattcagttgctgattggcttgatcgaaattgaagagcatttcaggtcgggaactgaaatcaatacaccgatctatctgtggcaaggactgacggacatctggttttaaaccaaatttatcgaccagactatcattgatgcatggaatggttttgtcaccctttttttgccagttaattttttgcccattactgattttgttgttattcaccgcaacgctaacaaaatattcaccgggagcaatgactcctttttcctttaataaactaatatcaatgcggtcgcgcatacttttatcgagaacattcagattgaattcgaccgccattgcgcaaggcatcgccatgaccaggcaggatacaaaagagagtcgataaatattcacggtgtccatacctgataaatattttatgaaaggcggcgatgatgccgccaaaataatacttatttataatccagcacgtaggttgcgttagcggttacttcacctgccgtgacatcgactgcattatcaatttgttccatccaggcgaaaaagttcagcgtctgttcactactgcttgcatccaggtcaagatctggcgcggcactacctaatacgatgttaccgtcatttttgtccatcagtcgtacaccgaccccagttgcttcgcctgcactggtgttgctcaacaaaggcgtagcaccagttgtcttagccgtgctatcgaaggttacgccaactttggataccggcattccgctaccgttgtcagaagcaggcagatcacagttgatcaagcgaatgtcgacggccactttattgctatgatgctcccggtttatatgggttgtcgtgacttgtccaagatctatgtttttatcaatatcttctggatgaatttcacaaggtgcttcaataacctcccccttaaagtgaatttcgccagaaccttcatcagcagcataaacaggtgcagtgaacagcagagatacggccagtgcggccaatgttttttgtcctttaaacataacagagtcctttaaggatatagaataggggtatagctacgccagaatatcgtatttgattattgctagtttttagttttgcttaaaaatattgttagttttattaaatgcaaaactaaattattggtatcatgaatttgttgtatgatgaataaaatataggggggtatagatagacgtcattttcatagggttataaatgcgactaccatgaagtttttaattgaaagtattgggttgctgataatttgagctgttctattctttttaaatatctatataggtctgttaatggattttatttttacaattttttgtgtttaggcatataaaaatcaacccgccatatgaacggcgggttaaaatatttacaacttagcaatcaaccattaacgcttgatatcgcttttaaagtcgcgtttttcatatcctgtatacagctgacgcggacgggcaatcttcataccgtcactgtgcatttcgctccagtgggcgatccagccaacggtacgtgccattgcgaaaatgacggtgaacatggaagacggaatacccatcgctttcaggatgataccagagtagaaatcgacgttcgggtacagtttcttctcgataaagtacgggtcgttcagcgcgatgttttccagctccatagccacttccagcaggtcatccttcgtgcccagctctttcagcacttcatggcaggtttcacgcattacggtggcgcgcgggtcgtaatttttgtacacgcggtgaccgaagcccatcaggcggaaagaatcatttttgtctttcgcacgacgaacaaattccggaatgtgtttaacggagctgatttcttccagcattttcagcgccgcttcgttagcaccgccgtgcgcaggtccccacagactagcaatacctgctgcgatacaggcaaacgggttcgcaccgctagagccagcggtacgcacggtggaggtagaggcgttctgttcatggtcagcgtgcaggatcagaatacggtccatagcacgttccagaatcggattaacttcatacggttcgcacggcgtggagaacatcatattcaggaagttaccggcgtaggagagatcgttgcgcgggtaaacaaatggctgaccaatggaatacttgtaacacatcgcggccatggtcggcattttgctcagcaggcggaacgcggcaatttcacggtgacgaggattgttaacatccaggctgtcgtgatagaacgccgccagcgcgccggtaataccacacatgactgccattggatggctgtcgcgacggaaagcatggaacagacgggtaatctgctcgtggatcatggtatgacgggtcaccgtagttttaaattcgtcatactgttcctgagtcggtttttcaccattcagcaggatgtaacaaacttccaggtagttagaatcggtcgccagctgatcgatcgggaaaccgcggtgcagcaaaataccttcatcaccatcaataaaagtaattttagattcgcaggatgcggtactagtgaagcctgggtcaaaggtgaacacacctttactaccgagagtacggatatcaataacatcttgacccagcgtgcctttcagcacatccagttcaacagctgtatccccgttgagggtgagttttgcttttgtatcagccatttaaggtctccttagcgccttattgcgtaagactgccggaacttaaatttgccttcgcacatcaacctggctttacccgttttttatttggctcgccgctctgtgaaagaggggaaaacctgggtacagagctctgggcgcttgcaggtaaaggatccattgatgacgaataaatggcgaatcaagtacttagcaatccgaattattaaacttgtctaccactaataactgtcccgaatgaattggtcaatacttccacactgttacataagttaatcttaggtgaaataccgacttcataacttttacgcattatatgcttttcctggtaatgtttgtaacaactttgttgaatgattgtcaaattagatgattaaaaattaaataaatgttgttatcgtgacctggatcactgttcaggataaaacccgacaaactatatgtaggttaattgtaatgattttgtgaacagcctatactgccgccaggtctccggaacaccctgcaatcccgagccacccagcgttgtaacgtgtcgttttcgcatctggaagcagtgttttgcatgacgcgcagttatagaaaggacgctgtctgacccgcaagcagaccggaggaaggaaatcccgacgtctccaggtaacagaaagttaacctctgtgcccgtagtccccagggaataataagaacagcatgtgggcgttattcatgataagaaatgtgaaaaaacaaagacctgttaatctggacctacagaccatccggttccccatcacggcgatagcgtccattctccatcgcgtttccggtgtgatcacctttgttgcagtgggcatcctgctgtggcttctgggtaccagcctctcttcccctgaaggtttcgagcaagcttccgcgattatgggcagcttcttcgtcaaatttatcatgtggggcatccttaccgctctggcgtatcacgtcgtcgtaggtattcgccacatgatgatggattttggctatctggaagaaacattcgaagcgggtaaacgctccgccaaaatctcctttgttattactgtcgtgcttagtcttctcgcaggagtcctcgtatggtaagcaacgcctccgcattaggacgcaatggcgtacatgatttcatcctcgttcgcgctaccgctatcgtcctgacgctctacatcatttatatggtcggttttttcgctaccagtggcgagctgacatatgaagtctggatcggtttcttcgcctctgcgttcaccaaagtgttcaccctgctggcgctgttttctatcttgatccatgcctggatcggcatgtggcaggtgttgaccgactacgttaaaccgctggctttgcgcctgatgctgcaactggtgattgtcgttgcactggtggtttacgtgatttatggattcgttgtggtgtggggtgtgtgatgaaattgccagtcagagaatttgatgcagttgtgattggtgccggtggcgcaggtatgcgcgcggcgctgcaaatttcccagagcggccagacctgtgcgctgctctctaaagtcttcccgacccgttcccataccgtttctgcgcaaggcggcattaccgttgcgctgggtaatacccatgaagataactgggaatggcatatgtacgacaccgtgaaagggagcgactatatcggtgaccaggacgcgattgaatatatgtgtaaaaccgggccggaagcgattctggaactcgaacacatgggcctgccgttcagccgtctcgatgatggtcgtatctatcaacgtccgtttggcggtcagagcaaaaacttcggcggcgagcaggcggcacgcactgcggcagcagctgaccgtaccggtcacgcactgttgcacacgctttatcagcagaacctgaaaaaccacaccaccattttctccgagtggtatgcgctggatctggtgaaaaaccaggatggcgcggtggtgggttgtaccgcactgtgcatcgaaaccggtgaagtggtttatttcaaagcccgcgctaccgtgctggcgactggcggagcagggcgtatttatcagtccaccaccaacgcccacattaacaccggcgacggtgtcggcatggctatccgtgccggcgtaccggtgcaggatatggaaatgtggcagttccacccgaccggcattgccggtgcgggcgtactggtcaccgaaggttgccgtggtgaaggcggttatctgctgaacaaacatggcgaacgttttatggagcgttatgcgccgaacgccaaagacctggcgggccgtgacgtggttgcgcgttccatcatgatcgaaatccgtgaaggtcgcggctgtgatggtccgtgggggccacacgcgaaactgaaactcgatcacctgggtaaagaagttctcgaatcccgtctgccgggtatcctggagctttcccgtaccttcgctcacgtcgatccggtgaaagagccgattccggttatcccaacctgtcactacatgatgggcggtattccgaccaaagttaccggtcaggcactgactgtgaatgagaaaggcgaagatgtggttgttccgggactgtttgccgttggtgaaatcgcttgtgtaagcgtacacggcgctaaccgtctgggcggcaacagcctgctggacctggtggtctttggtcgcgcggcaggtctgcatctgcaagagtctatcgccgagcagggcgcactgcgcgatgccagcgagtctgatgttgaagcgtctctggatcgcctgaaccgctggaacaataatcgtaacggtgaagatccggtggcgatccgtaaagcgctgcaagaatgtatgcagcataacttcagcgtcttccgtgaaggtgatgcgatggcgaaagggcttgagcagttgaaagtgatccgcgagcgtctgaaaaatgcccgtctggatgacacttccagcgagttcaacacccagcgcgttgagtgcctggaactggataacctgatggaaacggcgtatgcaacggctgtttctgccaacttccgtaccgaaagccgtggcgcgcatagccgcttcgacttcccggatcgtgatgatgaaaactggctgtgccactccctgtatctgccagagagcgaatccatgacgcgccgaagcgtcaacatggaaccgaaactgcgcccggcattcccgccgaagattcgtacttactaatgcggagacaggaaaatgagactcgagtttagtatttatcgctataacccggatgttgatgatgctccgcgtatgcaggattacaccctggaagcggatgaaggtcgcgacatgatgctgctggatgcgcttatccagctaaaagagaaagatcccagcctgagcttccgccgctcctgccgtgaaggtgtgtgcggttccgacggtctgaacatgaacggcaagaatggtctggcctgtattaccccgattagcgcactcaaccagccgggcaagaagattgtgattcgcccgctgccaggtttaccggtgatccgcgatttggtggtagacatgggacaattctatgcgcaatatgagaaaattaagccttacctgttgaataatggacaaaatccgccagctcgcgagcatttacagatgccagagcagcgcgaaaaactcgacgggctgtatgaatgtattctctgcgcatgttgtagtacctcttgtccgtctttctggtggaatcccgataagtttatcggcccggcaggcttgttagcggcatatcgtttcctgattgatagccgtgataccgagactgacagccgcctcgacggtttgagtgatgcattcagcgtattccgctgtcacagcatcatgaactgcgtcagtgtatgtccgaaggggctgaacccgacgcgcgccatcggccatatcaagagcatgttgttgcaacgtaatgcgtaaaccgtaggcctgataagacgcgcaagcgtcgcatcaggcaaccagtgccggatgcggcgtgaacgccttatccggcctacaagtcattacccgtaggcctgataagcgcagcgcatcaggcgtaacaaagaaatgcaggaaatctttaaaaactgcccctgacactaagacagtttttaaaggttccttcgcgagccactacgtagacaagagctcgcaagtgaaccccggcacgcacatcactgtgcgtggtagtatccacggcgaagtaagcataaaaaagatgcttaagggatcacgatgcagaacagcgctttgaaagcctggttggactcttcttacctctctggcgcaaaccagagctggatagaacagctctatgaagacttcttaaccgatcctgacagcgttgacgctaactggcgtaacacgttccagcagttacctggtacgggagtcaaaccggatcaattccactctcaaacgcgtgaatatttccgccgcctggcgaaagacgctagtcgttactctagtacgatctccgaccctgacaccaatgtgaagcaggttaaagtcctgcagctcattaacgcataccgcttccgtggtcaccagcatgcgaatctcgatccgctgggactgtggcagcaagataaagtggccgatctggatccgtctttccacgatctgaccgaagcagacttccaggagaccttcaacgtcggtagttttgccagcggcaaagaaaccatgaaactcggcgagctgctggaagccctcaagcaaacctactgcggcccgattggtgccgagtatatgcacattaccagcaccgaagaaaaacgctggatccaacagcgtatcgagtctggtcgcgcgactttcaatagcgaagagaaaaaacgcttcttaagcgaactgaccgccgctgaaggtcttgaacgttacctcggcgcaaaattccctggcgcaaaacgcttcagcctggaaggcggtgacgcgttaatcccgatgcttaaagagatgatccgccacgctggcaacagcggcacccgcgaagtggttctcgggatggcgcaccgtggtcgtctgaacgtgctggtgaacgtgctgggtaaaaaaccgcaagacttgttcgacgagttcgccggtaaacataaagaacacctcggcacgggtgacgtgaaataccacatgggcttcagctctgacttccagaccgatggcggcctggtgcacctggcgctggcgtttaacccgtctcaccttgagattgtaagcccggtagttatcggttctgttcgtgcccgtctggacagacttgatgagccgagcagcaacaaagtgctgccaatcaccatccacggtgacgccgcagtgaccgggcagggcgtggttcaggaaaccctgaacatgagcaaagcgcgtggttatgaagttggcggtacggtacgtatcgttatcaacaaccaggttggtttcaccacctctaatccgctggatgcccgttctacgccgtactgtactgatatcggtaagatggttcaggccccgatttttcacgttaacgcggacgatccggaagccgttgcctttgtgacccgtctggcgctcgatttccgtaacacctttaaacgtgatgtcttcatcgacctggtgtgctaccgccgtcacggccacaacgaagccgacgagccgagcgcaacccagccgctgatgtatcagaaaatcaaaaaacatccgacaccgcgcaaaatctacgctgacaagctggagcaggaaaaagtggcgacgctggaagatgccaccgagatggttaacctgtaccgcgatgcgctggatgctggcgattgcgtagtggcagagtggcgtccgatgaacatgcactctttcacctggagcccgtacctcaaccacgaatgggacgaagagtacccgaacaaagttgagatgaagcgcctgcaggagctggcgaaacgcatcagcacggtgccggaagcagttgaaatgcagtctcgcgttgccaagatttatggcgatcgccaggcgatggctgccggtgagaaactgttcgactggggcggtgcggaaaacctcgcttacgccacgctggttgatgaaggcattccggttcgcctgagcggtgaagactccggtcgcggtaccttcttccaccgccacgcggtgatccacaaccagtctaacggttccacttacacgccgctgcaacatatccataacgggcagggcgcgttccgtgtctgggactccgtactgtctgaagaagcagtgctggcgtttgaatatggttatgccaccgcagaaccacgcactctgaccatctgggaagcgcagttcggtgacttcgccaacggtgcgcaggtggttatcgaccagttcatctcctctggcgaacagaaatggggccggatgtgtggtctggtgatgttgctgccgcacggttacgaagggcaggggccggagcactcctccgcgcgtctggaacgttatctgcaactttgtgctgagcaaaacatgcaggtttgcgtaccgtctaccccggcacaggtttaccacatgctgcgtcgtcaggcgctgcgcgggatgcgtcgtccgctggtcgtgatgagcccgaaatccctgctgcgtcatccgctggcggtttccagcctcgaagaactggcgaacggcaccttcctgccagccatcggtgaaatcgacgagcttgatccgaagggcgtgaagcgcgtagtgatgtgttctggtaaggtttattacgacctgctggaacagcgtcgtaagaacaatcaacacgatgtcgccattgtgcgtatcgagcaactctacccgttcccgcataaagcgatgcaggaagtgttgcagcagtttgctcacgtcaaggattttgtctggtgccaggaagagccgctcaaccagggcgcatggtactgcagccagcatcatttccgtgaagtgattccgtttggggcttctctgcgttatgcaggccgcccggcctccgcctctccggcggtagggtatatgtccgttcaccagaaacagcaacaagatctggttaatgacgcgctgaacgtcgaataaataaaggatacacaatgagtagcgtagatattctggtccctgacctgcctgaatccgtagccgatgccaccgtcgcaacctggcataaaaaacccggcgacgcagtcgtacgtgatgaagtgctggtagaaatcgaaactgacaaagtggtactggaagtaccggcaagtgcagacggcattctggatgcggttctggaagatgaaggtacaacggtaacgtctcgtcagatccttggtcgcctgcgtgaaggcaacagcgccggtaaagaaaccagcgccaaatctgaagagaaagcgtccactccggcgcaacgccagcaggcgtctctggaagagcaaaacaacgatgcgttaagcccggcgatccgtcgcctgctggctgaacacaatctcgacgccagcgccattaaaggcaccggtgtgggtggtcgtctgactcgtgaagatgtggaaaaacatctggcgaaagccccggcgaaagagtctgctccggcagcggctgctccggcggcgcaaccggctctggctgcacgtagtgaaaaacgtgtcccgatgactcgcctgcgtaagcgtgtggcagagcgtctgctggaagcgaaaaactccaccgccatgctgaccacgttcaacgaagtcaacatgaagccgattatggatctgcgtaagcagtacggtgaagcgtttgaaaaacgccacggcatccgtctgggctttatgtccttctacgtgaaagcggtggttgaagccctgaaacgttacccggaagtgaacgcttctatcgacggcgatgacgtggtttaccacaactatttcgacgtcagcatggcggtttctacgccgcgcggcctggtgacgccggttctgcgtgatgtcgataccctcggcatggcagacatcgagaagaaaatcaaagagctggcagtcaaaggccgtgacggcaagctgaccgttgaagatctgaccggtggtaacttcaccatcaccaacggtggtgtgttcggttccctgatgtctacgccgatcatcaacccgccgcagagcgcaattctgggtatgcacgctatcaaagatcgtccgatggcggtgaatggtcaggttgagatcctgccgatgatgtacctggcgctgtcctacgatcaccgtctgatcgatggtcgcgaatccgtgggcttcctggtaacgatcaaagagttgctggaagatccgacgcgtctgctgctggacgtgtaatagtttaagtttcacctgcactgtagaccggataaggcattatcgccttctccggcaattgaagcctgatgcgacgctgacgcgtcttatcaggcctacgggaccaccaatgtaggtcggataaggcgcaagcgccgcatccgacaagcgatgcctgatgtgacgtttaacgtgtcttatcaggcctacgggtgaccgacaatgcccggaagcgatacgaaatattcggtctacggtttaaaagataacgattactgaaggatggacagaacacatgaacttacatgaatatcaggcaaaacaactttttgcccgctatggcttaccagcaccggtgggttatgcctgtactactccgcgcgaagcagaagaagccgctagtaaaatcggtgccggtccgtgggtagtgaaatgtcaggttcacgctggtggccgcggtaaagcgggcggtgtgaaagttgtaaacagcaaagaagacatccgtgcttttgcagaaaactggctgggcaagcgtctggtaacgtatcaaacagatgccaatggccaaccggttaaccagattctggttgaagcagcgaccgatatcgctaaagagctgtatctcggtgccgttgttgaccgtagttcccgtcgtgtggtctttatggcctccaccgaaggcggcgtggaaatcgaaaaagtggcggaagaaactccgcacctgatccataaagttgcgcttgatccgctgactggcccgatgccgtatcagggacgcgagctggcgttcaaactgggtctggaaggtaaactggttcagcagttcaccaaaatcttcatgggcctggcgaccattttcctggagcgcgacctggcgttgatcgaaatcaacccgctggtcatcaccaaacagggcgatctgatttgcctcgacggcaaactgggcgctgacggcaacgcactgttccgccagcctgatctgcgcgaaatgcgtgaccagagccaggaagatccgcgtgaagcacaggctgcacagtgggaactgaactacgttgcgctggacggtaacatcggttgtatggttaacggcgcaggtctggcgatgggtacgatggacatcgttaaactgcacggcggcgaaccggctaacttccttgacgttggcggcggcgcaaccaaagaacgtgtaaccgaagcgttcaaaatcatcctctctgacgacaaagtgaaagccgttctggttaacatcttcggcggtatcgttcgttgcgacctgatcgctgacggtatcatcggcgcggtagcagaagtgggtgttaacgtaccggtcgtggtacgtctggaaggtaacaacgccgaactcggcgcgaagaaactggctgacagcggcctgaatattattgcagcaaaaggtctgacggatgcagctcagcaggttgttgccgcagtggaggggaaataatgtccattttaatcgataaaaacaccaaggttatctgccagggctttaccggtagccaggggactttccacagtgaacaggccattgcatacggcactaaaatggttggcggcgtaaccccaggtaaaggcggcaccacccacctcggcctgccggtgttcaacaccgtgcgtgaagccgttgctgccactggcgctaccgcttctgttatctacgtaccagcaccgttctgcaaagactccattctggaagccatcgacgcaggcatcaaactgattatcaccatcactgaaggcatcccgacgctggatatgctgaccgtgaaagtgaagctggatgaagcaggcgttcgtatgatcggcccgaactgcccaggcgttatcactccgggtgaatgcaaaatcggtatccagcctggtcacattcacaaaccgggtaaagtgggtatcgtttcccgttccggtacactgacctatgaagcggttaaacagaccacggattacggtttcggtcagagcacctgtgtcggtatcggcggtgacccgatcccgggctctaactttatcgacattctcgaaatgttcgaaaaagatccgcagaccgaagcgatcgtgatgatcggtgagatcggcggtagcgctgaagaagaagcagctgcgtacatcaaagagcacgttaccaagccagttgtgggttacatcgctggtgtgactgcgccgaaaggcaaacgtatgggccacgcgggtgccatcattgccggtgggaaagggactgcggatgagaaattcgctgctctggaagccgcaggcgtgaaaaccgttcgcagcctggcggatatcggtgaagcactgaaaactgttctgaaataaatatctgtaataagaaatagccctcgccgcttccctctacaggaatggcgaagggctgtcggtttcgacatggttggccatcgtatgatggccttttttgtgcttatcggctactttttcgctgcgctatcagggtaaatttatagtcatcggtattaaaagcgttgcggctatattcaaacacccgaccatcaactaaatatccacggcttactttttcaagaatcggctttgtctggctgatattaagcagacggctcatctcttcggttggcatcagaggaatgatttcctgttcgctacgatcgataaccattttcttcacttcttcgataaagtgatatttgctattttccatgacctgccaggtgagatccgggaacaacgcaagcggcatccaggtttcttccagcgccattggcttttgcttgcgatagcgcacgcgcttcacatgccacacacgatcctgcggggtgatttgtagctgttgctgaagaaaatcgtcagccggaatcacttcgaatatcagaacttcactgtgtgtatcgacgtgacggtcgctcagtttttcatcaaaactggttaactgaaaaatatcgtaattgacccgctcttctttgacgtaagtcccgctgccctgaatgctttcgaggatctgctgctcgactagctggcgcaaagcctgacgcaccgtaacccggctgacgccaaactctgtttgtagcgcactttcagtgggtaacgcatcgccaggtttaagctcgccacgcgcaatttgttcacgaatgcgatcggcaatctgccggtataagggcttgtgtcccatttttagtatctcattaatacgaatttaaccattatgcccgataaattcatcctgtaaataatacaaatacaatacaaataatttcaatcaagtgaaattgatcacataatggtattgttttatcgggcacactggcgcgactataaaaacgatcaagtgaggatcatgatgaatctgacgactctgacccaccgcgatgcgttgtgtctgaatgcgcgctttaccagccgtgaagaggccatccacgcgttgactcaacgtcttgctgctctggggaaaatttccagtactgagcaatttctggaagaagtgtatcgccgtgaaagccttggcccgaccgccttaggtgaagggttggctgtgccgcatggcaaaactgctgcggtaaaagaagcggcgtttgcggtcgccacactcagcgagccgcttcagtgggaaggcgttgatggcccggaagcagttgatttagtggtgctgctggcgattccccccaatgaagcgggtactacgcatatgcaactgctgacagcgctgaccacgcgccttgcggatgatgagattcgggcgcgtatacagagcgcgacgacgcctgatgagttgctcagcgcgctggatgacaagggaggcacgcaaccttctgcctctttttccaacgcgccaactatcgtctgcgtaacggcctgtccggcgggtattgctcacacctatatggctgcggaatatctggaaaaagccggacgcaaactcggcgtaaatgtttacgttgaaaaacaaggcgctaacggcattgaagggcgtttaacggcggatcaactcaatagtgcaaccgcctgtatttttgcggctgaagtcgccatcaaggagagtgagcgttttaatggcattcccgcgcttagtgtgcctgttgccgagccgattcgccatgcagaagcgttgatccaacaagcgcttaccctcaagcgtagcgatgagacgcgtaccgtacagcaagatacgcaaccggtgaaaagtgtcaaaacggagctgaaacaggcactgttgagcggaatctcttttgccgtaccgttgattgtcgcggggggcacggtgctggcggtcgcggtattactgagccaaatcttcgggctacaagatctgtttaatgaagaaaactcctggctgtggatgtaccgcaagctgggcggcgggctgctcggaattttgatggtaccggtgctcgcggcctataccgcctattctctggcagataaaccggcgttagcgccaggctttgcggctggacttgccgccaacatgatcggctccgggtttctcggcgcggtcgttggcggattgatagccggttacttgatgcgctgggtgaaaaatcacttgcgtcttagcagtaaattcaatggattcctgactttttatctctacccggtgctcggtacgttgggagcgggcagtctgatgctgtttgtggtgggggaacctgtcgcctggatcaataacagccttaccgcctggctgaacggtctgagtggaagtaacgcgctgttgctgggtgccattctcggttttatgtgttcctttgaccttggagggccagtgaataaagccgcttatgcattctgcctgggcgcaatggcgaacggcgtttacggcccgtatgccattttcgcctccgtcaaaatggttagcgcatttaccgtaaccgcttccacgatgctcgcaccgcgcctgtttaaagagtttgaaattgagaccgggaaatccacctggctgttagggctggcaggtattaccgaaggggcgatcccgatggcgattgaagatccgctgcgggttattggtagctttgtgctgggctctatggtaacgggcgctattgtcggtgcgatgaatatcggccttagcacacccggtgccggcattttcagcctctttttacttcatgataatggcgcgggcggtgttatggcggcaattggctggtttggcgcggcattggtgggggctgcaatcagcactgcaattctcctgatgtggcggcgtcacgcggttaagcatggcaactatctgactgatggcgtaatgccataaacaaaaaggaaacgacgatgaaagcagtatctcgcgttcacatcaccccgcatatgcactgggatcgagagtggtatttcaccaccgaagagagtcgtattctgctggtcaataatatggaagagatcctgtgccgactggaacaggacaacgaatacaaatattacgtactcgacgggcaaacggcgatcctcgaagattatttcgcggtgaaaccggaaaacaaagaccgtgtgaagaaacaggtagaagccggcaagttgattatcggcccctggtatacccagaccgataccacgattgtttctgcggaatccatcgtccgtaatctgatgtacggaatgcgtgactgcctcgcgtttggcgagccgatgaaaataggttatttaccagattcctttggcatgtccgggcaactgccgcatatctacaatggatttggcattacccgcaccatgttctggcgcggatgtagcgagcgccacggtactgataaaaccgagtttttgtggcaaagcagtgacggtagcgaagtgacggcgcaggtgctgccgctgggctacgccatcggtaagtacttacctgccgacgaaaacggattacgtaaacgcctcgacagttattttgacgtgctggaaaaagcgtctgtaaccaaagagattttgctgccgaatgggcatgaccagatgccattgcagcaaaatatcttcgaagtgatggataagctacgtgagatctaccctcaacgtaagtttgtgatgagccgctttgaagaggtatttgagaagatcgaagcgcagcgagataatctggcaaccctgaaaggggaatttattgatggcaaatatatgcgcgtgcatcgcaccatcggttctacgcgtatggatatcaaaattgcccacgcgcgtattgaaaataagattgttaatctgctggaaccgctggcaacactggcctggacgttgggttttgaataccaccacggcttgctggagaaaatgtggaaagagatcttaaaaaatcatgcccacgacagtatcggctgctgctgtagtgacaaagttcatcgcgaaatcgtcgcccgcttcgaactggctgaagacatggcggataatctgattcgtttctacatgcgcaaaattgccgacaacatgccgcagagcgacgccgacaaactcgtcctgtttaacctgatgccctggccgcgtgaagaagttatcaacaccactgtgcggctgcgcgccagccagtttaatttgcgggacgatcgcggtcagcctgtaccgtattttattcgccatgcccgtgagatcgatccaggcctaatcgatcggcaaatagttcattacggtaattacgatccctttatggagtttgatatacagatcaaccagattgtcccttctatgggctatcgcacgctttatatcgaagcgaatcagcctggcaacgtaattgcggcaaaaagtgacgctgaagggatactggaaaatgctttctggcaaattgcgctcaatgaggatggttctctgcaactggtagataaagacagcggtgtgcgctatgaccgggtattgcaaattgaagaaagctctgatgatggtgatgaatatgactatagtcccgcaaaagaagagtgggtaattaccgcagcgaacgcgaaaccgcaatgcgatattattcatgaagcctggcagagcagggctgttatccgctatgacatggcagtgccgctcaatttgagtgaacgcagcgcccggcaatccactggcagagtaggggtggtgttggttgtcactcttagtcataacagcaggcgtattgatgtggatatcaatcttgataaccaggctgacgatcatcgccttcgtgtcctggtccctacaccttttaacaccgacagtgttctggcagatacgcagtttggtagcctaacgcgccccgtgaacgacagtgcaatgaacaactggcagcaagaaggctggaaagaagcgccggttccggtatggaatatgctcaactatgttgccttacaggaagggcgtaacggcatggctgtctttagcgaagggttacgtgaatttgaagtcatcggtgaagagaagaaaacctttgccattacgttgctgcgtggcgtgggcttactgggcaaagaagatctgcttttaaggcctgggcggcctagcggaattaaaatgccagtcccggacagtcaactacgtggtctgctttcttgtcgcctaagtttattgagttataccggtacgccaaccgccgctggtgtagctcagcaggcgcgagcatggctgactccagtacagtgttacaacaaaatcccatgggatgtgatgaagctcaacaaagccggattcaacgtgccggaaagttatagtttgttgaaaatgcccccagtgggatgcctgataagcgcacttaagaaagctgaagaccgacaagaagtgattttacggctgtttaatccggctgaaagtgcaacctgtgatgcgactgttgctttcagtcgcgaggtgatttcttgcagtgaaacgatgatggatgaacacattaccaccgaggaaaatcaaggtagtaatctaagcgggccttttttacccggccagagtcggacgttcagttaccggcttgcctgaatagcaatcaaaccgaagccacatatgcgcggccagattgttgacaaagggcgctttgttcatgccggatacggcatgaacgctttattcggtctacaaaagcaggcaaattcaatatattgcagagatgatgtagacactggcaagcgtagcgcatcaggtaattttgcgtttatcttcactctcaagccacgtatatgtggctttatttttaacaaaataataaccctgggtgagttaattataatataattataagttaactaaatgttaatattggcggggtggatttatgcctttattagtaatcctgaaactctgcgtcgtattagccagtgaccaaaaaaagaattaaggtcaaccgtgctgtttttgcttcgtctctttttatctttaattgccaaccgaaactaatttcagccttataactcacacattttaaacataaatgtcactaaagttaccttattgaaacatgattaacataatttgtaggaattgatatttatcaatgtataagtcttggaaatgggcatcaaaaagagataaattgttctcgatcaaattggctgaaaggcggtaatttagctataaattgatcaccgtcgaaaaatgcaaatttgcttcaacaaaaacctgtttattgtaaggattttgcggcgtaatatatacgtgggatcaatttgagtttttattaacatgtttgcaacctttctttacgccgtttttgtgtgcattcacatggtatgatgaaagtgttcaaacaaatttctattggggcatgcgtgtgaccctttctaacggggttcactctcggagtcttcatgcgatgagcaaggagtcatgatgttagatatagtcgaactgagccgcttacagtttgccttgaccgcgatgtaccacttcctttttgtgccactgacgctcggtatggcgttcctgctggccattatggaaacggtctacgtcctctccggcaaacagatttataaagatatgaccaagttctggggcaagttgtttggtatcaacttcgctctgggtgtggctaccggtctgaccatggagttccagttcgggactaactggtcttactattcccactatgtaggggatatcttcggtgcgccgctggcaatcgaaggtctgatggccttcttcctcgaatccacctttgtaggtctgttcttcttcggttgggatcgtctgggtaaagttcagcatatgtgtgtcacctggctggtggcgctcggtagtaacctgtccgcactgtggattctggttgcgaacggctggatgcaaaacccaatcgcgtccgatttcaactttgaaactatgcgtatggagatggtgagcttctccgagctggtgcttaacccggttgctcaggtgaaattcgttcacactgtagcgtctggttatgtgactggcgcgatgttcatcctcggtatcagcgcatggtatatgctgaaaggtcgtgacttcgccttcgctaaacgctcctttgctatcgctgccagcttcggtatggctgctgttctgtctgttattgttctgggtgatgaatccggctacgaaatgggcgacgtgcagaaaaccaaactggctgctattgaagccgagtgggaaacgcaacctgcgcctgctgcctttactctgttcggcattcctgatcaggaagaggagacgaacaaatttgcgattcagatcccttacgcactgggcatcattgcaacgcgttccgtggataccccggttatcggcctgaaagagctgatggtgcagcatgaagaacgcattcgtaacgggatgaaggcgtactctctgctcgaacaactgcgttctggttctaccgaccaggcggttcgtgaccagttcaatagcatgaagaaagacctcggttacggtctgctgctgaaacgctatacgccaaacgtggctgatgcgactgaagcgcagattcaacaggcaaccaaagactccatcccgcgtgtagcgccgctgtactttgcgttccgtatcatggtggcgtgtggcttcctgcttctggcaatcatcgcgctctctttctggagtgtcatccgcaaccgcattggcgagaaaaaatggcttctgcgcgccgcgctgtacggtattccgctgccgtggattgctgtagaagcgggctggttcgtggctgaatatggccgccaaccgtgggctatcggtgaagtgctgccgacagctgtggcgaacagcagtctgaccgcaggcgatctcatcttcagtatggtgctgatttgcggcctgtataccctgttcctggtggcagaattgttcttaatgttcaagtttgcacgcctcggcccaagcagcctgaaaaccggtcgctatcactttgagcagtcttccacgactactcagccggcacgctaagacaggagtcgtcaaatgatcgattatgaagtattgcgttttatctggtggctgctggttggcgttctgctgattggttttgcagtcactgacggtttcgacatgggggtgggcatgctcacccgtttcctcggtcgtaacgacaccgagcgtcgaattatgattaactccattgcaccacactgggacggtaaccaggtttggctgatcaccgcgggcggcgcactctttgctgcctggccgatggtctatgccgctgcgttctccggcttctatgtggcgatgatcctcgtgctggcgtctttgttcttccgtccggtcggttttgactaccgctccaagattgaagaaacccgctggcgtaacatgtgggactggggcatcttcattggtagcttcgttccgccgctggtaattggtgtagcgttcggtaacctgttgcagggcgtaccgttcaacgttgatgaatatctgcgtctgtactacaccggtaacttcttccagttgcttaacccgttcggcctgctggcaggcgtggtgagcgtagggatgatcattactcagggcgcaacctatctgcaaatgcgtaccgtgggcgaactgcacctgcgtacccgtgcaacggctcaggtggctgcgctggtgacactggtctgtttcgcactggctggcgtatgggtgatgtacggtatcgatggttatgtcgtgaaaagcacaatggaccattacgcagcctctaacccactgaataaagaagtggttcgtgaagctggcgcatggctggttaacttcaacaacacgccaattctgtgggctattccggcactgggtgtggttctgccgctgctgaccatcctgactgcacgtatggataaagccgcgtgggcgtttgtgttctcctccctgacgctggcctgcatcatcctgacagccggtatcgcaatgttcccgtttgtgatgccgtccagcaccatgatgaacgcaagtctgacaatgtgggatgcaacttccagccagctgacgcttaacgtcatgacctgggttgcggtggttctggtaccgatcattctgctctacaccgcctggtgttactggaaaatgttcggtcgtatcaccaaagaagatattgaacgtaacacccactctctgtactaagtaaggagctaaaaatgtggtatttcgcatggattctgggaacgcttcttgcctgtagctttggggtaatcaccgcgctggcgcttgaacacgtcgaaagtggcaaagccggtcaagaagacatctgatgagtaagattatcgcgactttgtatgcggtaatggacaagcgccccctgcgggcgctttccttcgtgatggcgcttctgttagcaggatgtatgttttgggacccatctcgttttgccgcgaagaccagtgaactggaaatctggcatggtttattgctgatgtgggccgtctgtgctggtgtgattcacggcgtgggctttcgtccgcagaaggttctttggcaagggattttttgcccattgcttgccgatattgttctcattgtcgggctgattttcttcttcttttaaatcagaattctctttaaaaaattatgggccgctccaggcccataaatttttacgctcccttaacttgccctcattcccaaacctcaatcgcgcgcgtatagtagcagcgtttaaaagctctaacttttgttgcattaccgggatgtaaagtgaatacaacgctgtttcgatggccggttcgcgtctactatgaagataccgatgccggtggtgtggtgtaccacgccagttacgtcgctttttatgaaagagcacgcacagagatgctgcgtcatcatcacttcagtcagcaggcgctgatggctgaacgcgttgcctttgtggtacgtaaaatgacggtggaatattacgcacctgcgcggctcgacgatatgctcgaaatacagactgaaataacaagtatgcgtggcacctctttggttttcacgcaacgtattgtcaacgccgagaatactttgctgaatgaagcagaggttctggttgtttgcgttgacccactcaaaatgaagcctcgtgcgcttcccaagtctattgtcgcggagtttaagcagtgactgacatgaatatccttgatttgttcctgaaggctagccttctggttaaacttatcatgttgattttgattggttttagtatcgcatcttgggccattattatccagcggacccgtattcttaacgcagcggcgcgcgaagccgaagcgtttgaagataaattctggtctggaatcgaactctctcgcctctatcaagagagccaggggaaacgggataatctgactggtagcgaacaaatcttttacagcgggttcaaagagtttgtgcgcctgcatcgtgccaatagccatgcgccggaagccgtagtggaaggggcgagccgtgctatgcgtatctccatgaaccgtgaacttgaaaatctggaaacgcacattccgttcctcggtacggttggctccatcagcccgtatattggtctgtttggtacggtctgggggatcatgcacgcctttatcgccctcggggcggtaaaacaagcaacactgcaaatggttgcgcccggtatcgcagaagcgttgattgcgactgcaattggtctgtttgccgctatcccggcagttatggcctacaaccgcctcaaccagcgcgtaaacaaactggaactgaattacgacaactttatggaagagtttaccgcgattctgcaccgccaggcgtttaccgttagcgagagcaacaaggggtaagccatggccagagcgcgtggacgaggtcgtcgcgatctcaagtccgaaatcaacattgtaccgttgctggacgtactgctggtgctgttgctgatctttatggcgacagcgcccatcatcacccagagcgtggaggtcgatctgccagacgctactgaaagtcaggcggtgagcagtaacgataatccgccagtgattgttgaagtgtctggtattggtcagtacaccgtggtggttgagaaagatcgcctggagcgtttaccaccagagcaggtggtggcggaagtgtccagccgtttcaaggccaacccgaaaacggtctttctgatcggtggcgcaaaagatgtgccttacgatgaaataattaaagcactgaacttgttacatagtgcgggtgtgaaaagcgttggtttaatgacgcagcctatctaaacatctgcgtttcccttgcttgaaagagagcgggtaacaggcgaacagtttttggaaaccgagagtgagtaaggcaaccgaacaaaacgacaagctcaagcgggcgataattattagtgcagtgctgcatgtcatcttatttgcggcgctgatctggagtagcttcgatgagaatatagaagctagtgccggaggcggcggtggtagctccatcgacgctgtcttggttgatagtggtgcggtagttgagcagtacaaacgcatgcaaagccaggaaagtagcgcgaagcgttctgatgaacagcgcaagatgaaggaacagcaggctgctgaagaactgcgtgagaaacaagcggctgaacaggaacgcctgaagcaacttgagaaagagcggttagcggctcaggagcagaaaaagcaggctgaagaagccgcaaaacaggccgagttaaagcagaagcaagctgaagaggcggcagcgaaagcggcggcagatgctaaagcgaaggccgaagcagatgctaaagctgcggaagaagcagcgaagaaagcggctgcagacgcaaagaaaaaagcagaagcagaagccgccaaagccgcagccgaagcgcagaaaaaagccgaggcagccgctgcggcactgaagaagaaagcggaagcggcagaagcagctgcagctgaagcaagaaagaaagcggcaactgaagctgctgaaaaagccaaagcagaagctgagaagaaagcggctgctgaaaaggctgcagctgataagaaagcggcagcagagaaagctgcagccgacaaaaaagcagcagaaaaagcggctgctgaaaaggcagcagctgataagaaagcagcggcagaaaaagccgccgcagacaaaaaagcggcagcggcaaaagctgcagctgaaaaagccgctgcagcaaaagcggccgcagaggcagatgatattttcggtgagctaagctctggtaagaatgcaccgaaaacggggggaggggcgaaagggaacaatgctagccctgccgggagtggtaatactaaaaacaatggcgcaagtggggccgatatcaataactatgccgggcagattaaatctgctatcgaaagtaagttctatgacgcaagctcctatgcaggcaaaacctgtacgctgcgcataaaactggcacccgatggtatgttactggatatcaaacctgaaggtggcgatcccgcactttgtcaggctgcgttggcagcagctaaacttgcgaagatcccgaaaccaccaagccaggcagtatatgaagtgttcaaaaacgcgccattggacttcaaaccgtaatcgcgatgttgactgttcggacggtcaacatcaggcaccggttgccacggggttctggtagttttgtgtattttagtttgttaacattctgctaaattatcgtgggccatcggtccagataagggagatatgatgaagcaggcattacgagtagcatttggttttctcatactgtgggcaagtgttctgcatgctgaagtccgcattgtgatcgacagcggtgtagattccggtcgtcctattggtgttgttcctttccagtgggcggggcctggtgcggcacctgaagatattggcggcatcgttgctgctgacttgcgtaacagcggtaaatttaatccgttagatcgcgctcgtctgccacagcagccgggtagtgcgcaggaagtacaaccagctgcatggtccgcactgggcattgacgctgtagttgtcggtcaggtcactccgaatccggatggttcttacaatgttgcttatcaacttgttgacactggcggcgcaccgggtactgtacttgctcagaacagctacaaagtgaacaagcagtggctgcgttatgctggtcataccgccagtgatgaagtgtttgaaaaactgaccggcattaaaggtgcgttccgtactcgtattgcctacgttgttcagaccaacggcggtcagttcccgtatgaactgcgcgtatctgactatgacggttacaaccagtttgtcgttcaccgtagtccgcagccgctgatgtctccggcgtggagtccagacggttctaaactggcttatgtgaccttcgaaagcggtcgttccacgctggttattcagacgctggcaaatggcgctgtacgtcaggtggctagtttcccgcgtcacaacggtgcacctgcattcagcccagacggcagcaaactggcattcgccttgagcaaaaccggtagtctgaacctgtacgtaatggatttggcttctggtcagatccgccaggtgactgatggtcgcagtaacaataccgaaccgacctggttcccggatagccagaacctggcatttacttctgaccaggccggtcgtccgcaggtttataaagtgaatatcaacggcggtgcgccacaacgtattacctgggaaggtagccagaaccaggatgcggatgtcagcagcgacggtaaatttatggtaatggtcagctccaatggtgggcagcagcacattgccaaacaagatctggcaacgggaggcgtacaagttctgagctccacgttcctggatgaaacgccaagtctggcacctaacggcactatggtaatctacagctcttctcaggggatgggatccgtgctgaatttggtttctacagatgggcgtttcaaagcgcgtcttccggcaactgatggacaggtcaaattccctgcctggagcccgtatctgtgataataattaattgaatagtaaaggaatcattgaaatgcaactgaacaaagtgctgaaagggctgatgattgctctgcctgttatggcaattgcggcatgttcttccaacaagaacgccagcaatgacggcagcgaaggcatgctgggtgccggcactggtatggatgcgaacggcggcaacggcaacatgtcttccgaagagcaggctcgtctgcaaatgcaacagctgcagcagaacaacatcgtttacttcgatctggacaagtacgatatccgttctgacttcgctcaaatgctggatgcacatgcaaacttcctgcgtagcaacccgtcttacaaagtcaccgtagaaggtcacgcggacgaacgtggtactccggaatacaacatctccctgggtgaacgtcgtgcgaacgccgttaagatgtacctgcagggtaaaggcgtttctgcagaccagatctccatcgtttcttacggtaaagaaaaacctgcagtactgggtcatgacgaagcggcatactccaaaaaccgtcgtgcggtactggtttactaagagaattgcatgagcagtaacttcagacatcaactattgagtctgagcttactggttggtatagcggccccctgggccgcttttgctcaggcaccaatcagtagtgtcggcagtggcagcgtcgaagaccgcgtcactcaacttgagcgtatttctaatgctcacagccagcttttaacccaactccagcaacaactttctgataatcaatccgatattgattccctgcgtggtcagattcaggaaaatcagtatcaactgaatcaggtcgtggagcggcaaaagcagatcctgttgcagatcgacagcctcagcagcggtggtgcagcggcgcaaagtaccagcggcgatcaaagcggtgcggcggcaagtacgacgccgacagctgatgctggtactgcgaatgctggcgcgccggtgaaaagcggtaatgcaaacacggattacaatgcagctattgcgctggtgcaggataaatcccgccaggatgacgcaatggtggcatttcagaatttcatcaaaaattaccctgatagtacttacctgccaaacgccaattattggctgggtcagttaaactacaacaagggtaaaaaagatgatgcggcgtactattttgctagcgtagtgaaaaactatccgaagagtccaaaggctgcagatgcgatgtttaaagtcggcgtcatcatgcaggacaaaggtgacaccgcaaaagcgaaagccgtataccagcaggttatcagtaaataccctggtactgatggcgctaaacaggcacaaaaacgtctgaacgcgatgtaatgcataacacacgaccagaagtcgcattatttctggtcgtgtcgtgcgaatcataagcagttgagtgatctacatcgaaatttttgttgcgctcaagtctgaaatcagtaatatatgccgccgttgccacgggatatcaaacaaaccgaaagcaacgaaaaagtgggtcgttagctcagttggtagagcagttgacttttaatcaattggtcgcaggttcgaatcctgcacgacccaccaatcgctaaggtggaagcggtagtaaaacgtgaaggataacgttgcatgagcaacggcccgaagggcgagacgaagtcgagtcatcctgcacgacccaccactaacatagttagttgtagtatccagcgtagtatcgggtgattagctcagctgggagagcacctcccttacaaggagggggtcggcggttcgatcccgtcatcacccaccaccgggtcgttagctcagttggtagagcagttgacttttaatcaattggtcgcaggttcgaatcctgcacgacccaccagttttaacatcgaagacagatgttaagcgtgtaggataacgttgcgtcagcaacggcccgtagggcgagcgaagcgagtcatcctgcacgacccaccactaatgacggtgggttcggtggaagtagtttgtagtatccagcgcagtatcgggtgattagctcagctgggagagcacctcccttacaaggagggggtcggcggttcgatcccgtcatcacccaccactcgggtcgttagctcagttggtagagcagttgacttttaatcaattggtcgcaggttcgaatcctgcacgacccaccagttttaacatcaaactcagatgttaagcgtgaaggataacgttgcgccagcaacggcccgtagggcgagcgaagcgagtcatcctgcacgacccaccaatcttaaagattggccccgagtaaaaatctttcaggtaacacccgtatgggtcgttagctcagttggtagagcagttgacttttaatcaattggtcgcaggttcgaatcctgcacgacccaccaatttaaaggtggttactggtagagaacgtgaaggataacgttgcgttagcaacggcccgaagggcgagacgaagtcgagtcatcctgcacgacccaccatcctgaatgattaaggcagcataatcccgcaaggggtcgttagctcagttggtagagcagttgacttttaatcaattggtcgcaggttcgaatcctgcacgacccaccaatgtaaaaaagcgccctaaaggcgcttttttgctatctgcgatactcaaagattcgaacctgcagcaggtttgagttgagcgcagcgaaacaacggagccgctcgcggcgacggcccgaagggcgagcgaagcgagtcatcctgcacgacccaccaatgtaaaaaagcgccctaaaggcgcttttttgctattcaggcatcctcaatttcactttgtaaacctgatgacatcgtcagagcttactgtgcaagcaactctatgtcggtggaattaggcgtaaaatgacgcatcctgcacattaggcgtaattcgagtgacttttccccaccattcgactatcttgtttagcatataaaacaaattacaccgataacagcgaatattacgctaatgtcggttttaacgttaagcctgtaaaacgagatggtaagatgagcgtaatgtttgatccagacacggcgatttatcctttccccccgaagccgacgccgttaagcattgatgaaaaagcgtattaccgcgagaagataaaacgtctgctaaaagaacgtaatgcggtgatggttgcccactactataccgatcccgaaattcaacaactggcagaagaaaccggtggctgtatttctgattctctggaaatggcgcgcttcggtgcaaagcatcccgcttctactttgttagtcgctggggtgagatttatgggagaaaccgccaaaattctcagtccggaaaaaacaattctgatgccgacacttcaggctgaatgtagtctggatctcgactgccctgttgaagaatttaacgcattttgcgatgcccatcccgatcgtactgtcgtcgtctacgccaacacttctgctgcggtaaaagcgcgcgcagattgggtggtaactagtagcattgccgtcgaacttattgatcatcttgatagtttgggtgaaaaaatcatctgggcacccgacaaacatctggggcgttacgtgcaaaaacagacgggtggagacattctatgctggcagggtgcctgtattgtgcatgatgaatttaagactcaggcgttaacccgcttgcaagaagaatacccggatgctgccatactggtgcatccagaaagtccacaagctattgtcgatatggcggatgcggtcggttccaccagtcaactgatcgctgctgcgaaaacattgccacatcagaggcttattgtggcaaccgatcggggtattttctacaaaatgcagcaggcggtgccagataaagagttactggaagcaccaaccgcaggtgagggtgcaacctgccgcagctgcgcgcattgtccgtggatggccatgaatggccttcaggccatcgcagaggcattagaacaggaaggaagcaatcacgaggttcatgttgatgaaaggctgcgagagagggcgctggtgccgctcaatcgtatgctggattttgcggctacactacgtggataacgaataataaggcgtaacgttacgctttgggggaaagatggatttttttagtgtgcagaatatcctggtacatataccaataggggcaggcggttatgatctcagttggatcgaagcggtaggcacgatcgccgggttgctgtgtattggccttgccagtctggagaagatcagcaactacttctttggcctgatcaacgtcaccttgtttggcattattttctttcagattcagctgtatgccagcctgctattacaggtgtttttctttgccgcgaatatttacggttggtatgcgtggagccgacaaaccagtcagaacgaggcggagttgaaaattcgctggttgccattgccgaaggcactcagctggttggcggtttgcgttgttagcattggtctgatgacggtatttatcaatccggtgtttgcatttttgacccgcgtggcagtcatgatcatgcaagcattaggattacaggttgtgatgcctgaactgcaaccggacgctttcccgttctgggatagttgcatgatggtgttatctatcgtggcaatgattctgatgacgcgtaagtatgtggaaaactggctgttgtgggtgattattaacgtgattagcgtcgttatttttgcacttcagggcgtttacgccatgtctctggagtacatcatcctgacctttattgcgctcaacggcagccggatgtggatcaacagcgcacgtgaaagaggcagtcgcgcgctgtcccattaatggtgatgatgactatggccagacaccccttcattcaggtggcagtctggcccatgacaaggttgatattccatctgaatggtggcgtgctcaatctgatagtgatccatcaggtagtgttggatctgatccaacaaggcatcgtgatcgtgtggcgggatcacctgcacatgcaacgtcatcaccggcttctcgcctaccatccatacatgtacatggtgcacattgcggacttccgggatttcccggcacatacgacgcttcagttcagcgatatccaggcttaccggtgcaccttcaagtaattcattcacgctatctttcaacagtcgccacgcgctacgcagaaccagaaggctcaccagtatgctgagaatggggtcagcaggtgtccagccagtccagataataatcaacgcggcaataatagccccaacgctacccagcaggtccccgagcacatgcagtgccgctgctcgtacgttgaggtttttctcttcgctgccgtgatgaagtaaccagaaagaaagtatatttgccagcaacccagccacggcaattgccatcatcatgccgccctcgaccggacgcggcgtgcggaagcgttctatcgcctcccagacaatcaaaatggtaattaccacgagggctatggcattcacaaacgccgcgagcgtggtcagtcttagccaaccgaaagtgtggcgaatggtgggaggacgacgactaaattgcacggcgagtagggcgaaaagcagggcggcagtatcggtcaacatatgacccgcatcggccagcaatgccagagaaccagaaagaaaaccaccaacgacttctaccagcataaacccggcagtcacgccgaaagcatacaacaagcgacgagcattattatcttctggcaggtgactggacgtgtgactgtgactgtgcgccatgacgagtcatcccttaattattctcacttaactttatgacatcatactgcttttagaagtgaaaaattaaaagggagagactccgctctcccattattggctattttgcagggttactgcgtggtaccgtcggttttggtatcgacatcattattgatgccatcaccggtttgtacctttttattgatatccggacagcgaccatctttgcacatggtgttcttgtgctcttcatctttggtcattccgtcattgttcatactagaaccatcgctatgcagcattgtgccgccagaaccggtatttaccccgttattgtcgacgttatttggcgcgacattttcacgggcgtcaggggctacctggcccgcatcagctgcggcgtttgcctggccgttattagtttgcgctccgctatcggcagccagtgcggcaccgctggcaaggcttagagtggcagtcagaaataatgtggccagttttgtcattttcataggatgctcctgttatggtcgttatgtcggataacctcttccaacagtgcatttgcaggtgaatataaggcattggtttaagatttcagccaggttatgaaacgcagcagagaatcttgaaataattaacaaacaaaggagttacagttagaaattgtaggagagatctcgtttttcgcgacaatctggcgtttttcttgctaattccaggattaatccgttcatagtgtaaaaccccgtttacacattctgacggaagatatagattggaagtattgcattcactaagataagtatggcaacactggaacagacatgaattatcagaacgacgatttacgcatcaaagaaatcaaagagttacttcctcctgtcgcattgctggaaaaattccccgctactgaaaatgccgcgaatacggttgcccatgcccgaaaagcgatccataagatcctgaaaggtaatgatgatcgcctgttggttgtgattggcccatgcagtattcatgatcctgtcgcggcaaaagagtatgccactcgcttgctggcgctgcgtgaagagctgaaagatgagctggaaatcgtaatgcgcgtctattttgaaaagccgcgtaccacggtgggctggaaagggctgattaacgatccgcatatggataatggcttccagatcaacgacggtctgcgtatagcccgtaaattgctgcttgatattaacgacagcggtctgccagcggcaggtgagtttctcgatatgatcaccccacaatatctcgctgacctgatgagctggggcgcaattggcgcacgtaccaccgaaagccaggtgcaccgcgaactggcaagtgggctttcttgtccggtcggcttcaaaaatggcaccgacggtacgattaaagtggctatcgatgccattaatgccgccggtgcgccgcactgcttcctgtccgtaacgaaatgggggcatagcgcgattgtgaataccagcggtaacggcgattgccatatcattctgcgcggcggtaaagagcctaactacagcgcgaagcacgttgctgaagtgaaagaagggctgaacaaagcaggcctgccagcacaggtgatgatcgatttcagccatgctaacagctccaaacaattcaaaaagcagatggatgtttgtgctgacgtttgccagcagattgccggtggcgaaaaggccattattggcgtgatggtggaaagccatctggtggaaggcaatcagagcctcgagagcggggagccgctggcctacggtaagagcatcaccgatgcctgcatcggctgggaagataccgatgctctgttacgtcaactggcgaatgcagtaaaagcgcgtcgcgggtaaggtttaattgtcggatgcgccgtcagagtggcgtatccgatgaatcaccacaggcctgataagtcgcgcagcgtcgcatcaggcaatgtgctccattgttagcaacaaaaaagccgactcacttgcagtcggctttctcattttaaacgaatgacgtttacttcgctttaccctggtttgcaaccgccgctgctttcgctgcgatctcgtcagcattacccagataatagcgtttcagcggtttgaaattctcgtcgaactcatacaccagcggcacgccagtcgggatattaagctcaagaatctcttcttcgctcatgttatcaagatatttcaccagcgcacgtaaagagttaccgtgtgcagcgatgatcacgcgctcaccgctcttcatacgcggcagaatagtttcattccagtaagggatcacgcggtcaatggtcagcgccaggctttccgtcagcggcagttctttctcgctcagtttcgcgtaacgcggatcgtgacccggataacgctcatcatctttagtcagttccggcggagtcactgcaaaaccacgacgccactgtttcacctgctcgtcgccatacttttcagcagtttccgctttgttcagaccctgcaacgcaccgtagtgacgttcgttcagtttccaggatttctcaacgggcagccatgcctgatccagttcgtccagcacattccacagggtatggatagcgcgtttcagcacagaagtgtaagcaaagtcaaagctgtaaccttcctctttcagcagcttacctgctgcttttgcttcgcttacgcctttctcagacagatccacgtcgtaccaaccggtgaaacggttttctttgttccactgactttcgccatgacgaaccagaaccagcttagttacagccatatacttactcctcaaatcatcttttaatgataataattctcattatattgccgcgacgaagcaacagcaatgcttacgcataaccatagcgaaaatagtggcgcagtgtaaggttgttgtgaatattgagttgcaaatatgtcggtgtttgctggtgatttgaacaatatgagataaagccctcatgacgagggcgtaacattactcagcaataaactgatattccgtcaggctggaatactcttcgccaggacgcaggaagcagtccggttgcggccattcagggtggttcgggctgtccggtagaaactcgctttccagagccagcccttgccagtcggcgtaaggttcggttccccggctcggtgtgccgccgaggaagttgccggagtagaattgcagagccggagcggtggtgtagaccttcagctgcaatttttcatctgcactccagacatgcgccgccactttcttgccatcgcctttggcctgtaacaagaatgcgtgatcgtaacctttcactttgcgctgatcgtcgtcggcaagaaactcactggcgatgattttggcgctgcggaaatcaaaagacgttccggcgacagatttcaggccgtcgtgcggaatgccgccttcatcaaccggcagatattcgtccgccagaatctgcaacttgtgattgcgcacgtcagactgctcgccgtcaagattgaaatagacgtgattagtcatattcaccgggcaaggtttatcaactgtggcgcgataagtaatggagatacggttatcgtcggtcagacgatattgcaccgtcgcgccgagattacccgggaagccctgatcaccatcatcactactcagggcaaacagcacctgacgatcgttctggttcacaatctgccagcgacgtttgtcgaacccttccggcccgccgtgcagctggttaacgccctgacttgggctaagcgtcacggtttcaccgtcaaaggtataacggctattggcgatacggttggcataacgaccaatagaggcccccagaaacgcggcctgatcctgatagcattccgggctggcacagccgagcagcgcctcgcggacgctgccatcggaaagcggaatacgggcggaaagtaaagtcgcaccccagtccatcagcgtgactaccatccctgcgttgttacgcaaagttaacagtcggtacggctgaccatcgggtgccagtgcgggagtttcgttcagcactgtcctgctccttgacttggtttacaaacgtaaaaagtctctttaatacctgtttttgcttcatattgttcagcgacagcttgctgtacggcaggcaccagctcttccgggatcagcgcgacgatacagccgccaaatccgccgccggtcatgcgtacgccacctttgtcgccaatcacagctttgacgatttctaccagagtgtcaatttgcggcacggtgatttcgaaatcatcgcgcatagaggcatgagactccgccatcaactcgcccatacgtttcaggtcgccttgctccagcgcgctggcagcttcaacggtgcgggcgttttcagtcagtatatgacgcacgcgttttgccacgatcgggtccagttcatgcgcaacagcgttgaactcttcaatggtgacatcacgcagggctggctgctggaagaaacgcgcaccggtttcgcactgttcacgacgggtgttgtattcgctgccaaccagggtacgtttgaagttactgttgatgatgacgacagccacacctttgggcatggaaactgctttggtccccagactgcggcaatcgatcagcaaggcatgatctttcttgccgagcgcggaaattagctgatccatgatcccgcagttacagcctacaaactggttttctgcttcctgaccgttaagcgcgatttgtgcgccgtccagcggcagatgataaagctgctgcaatacggttccgaccgcgacttccagactagcggaagaacttaacccggcaccctgcggcacattgccgctgatcaccatgtccacgccgccgaagctgttgttacgcagttgcagatgtttcaccacgccacgaacgtagttagcccattgatagttttcatgtgcgacaatgggcgcatcgagggaaaactcgtcgagctgattttcataatcggctgccatcacgcgaactttacggtcatcgcgtggtgcacaactgatcacggtttgataatcaatcgcgcagggcagaacgaaaccgtcgttgtagtcggtgtgttcaccaatcaaattcacgcggccaggcgcctgaatggtgtgagtggcagggtagccaaatgcgttggcaaacagagattgtgttttttctttcagactcatttcttacactccggattcgcgaaaatggatatcgctgactgcgcgcaaacgctctgctgcctgttctgcggtcaggtctcgctgggtctctgccagcatttcataaccaaccataaatttacgtacggtggcggagcgcagcagaggcggataaaagtgcgcgtgcagctgccagtgttgattctcttcgccattaaatggcgcgccgtgccagcccatagagtaggggaaggagcactggaagaggttgtcataacgactggtcagctttttcaacgccagcgccagatcgctgcgctgggcgtcggtcaaatcggtgatccgtaaaacgtgggctttgggcagcagtagcgtttcgaacggccaggcagcccagtaaggcacgacggctaaccagtgttcggtttcgacaacggtacggctaccgtctgccagctcgcgctgaacataatccaccagcattggacttttctgttcggcaaaatattctttttgcaggcggtcttcgcgctcagcttcgttaggcaggaagctatttgcccaaatctgaccgtgcggatgcgggttagagcagcccatcgccgcgcctttgttttcaaaaacctgcacccatgggtacgttttccccagttctgcggtttgctcctgccaggttttgacgatttccgtcaatgctgcaacgctgagctctggcagcgttttactgtgatccggactaaagcagatcacccggctggtgccgcgcgcgctctggcaacgcatcagcggatcgtgactttctggcgcatctggcgtgtcagacatcaaagccgcaaagtcattagtgaaaacgtaagtcccggtgtaatcggggtttttatcgcctgtcacccgcacattacctgcgcagaggaagcaatctggatcgtgcgcaggtaacacctgtttggctggcgtttcctgcgccccctgccaggggcgcttagcgcggtgcggactaaccagaatccattgcccggtgagcgggttgtagcggcgatgtggatgatcaacgggattaaattgcgtcatggtcgttccttaatcgggatatccctgtggatggcgactctgccagtgccaggtgtcctgcgccatttcatcgagtgtgcgcgttacgcgccagttcagttcacggtcggctttgctggcgtccgcccagtaggccggaaggtcgccctcgcgacgcggtgcaaaatgataattaaccggtttgccgcaggctttgctgaaggcattaaccacgtccagcacgctgttgcctacgccagcgccgaggttgtagatgtgtacgcctggcttgttcgccagtttttccatcgccacgacgtgaccgtccgccagatccattacgtggatgtaatcgcgtacgccagtaccatcttcggtcggataatcgttaccaaaaatcgccaggctgtcgcgacggcctacagcaacctgggcgatgtatggcatcaggttattcggaatgccttgcggatcttcgcccatatcgccgctcggatgcgcgccaaccgggttgaagtagcgcagcagggcaatgctccagtccggctgggctttttgcagatcggtgaggatctgttccaccatcagcttgcttttgccgtaagggctttgcggtgtgccggtcgggaagctttcaacgtatggaattttgggctgatcgccataaacggtggcggaggagctaaaaataaagtttttgacgttagcggcgcgcatggcgctaatcaggcgcagagtgccgttgacattgttgtcgtaatattccagcggtttttgtacgctttcgcccacggctttcagcccggcgaagtggatcacggtgtcgatagcgtgatcgtgcaggatctcggtcatcaacgcttcgttacgaatatcgccttcaacaaacgttggatgtttgccgcctaaacgctcgataacaggcagtacgatgcgcttactgttacagaggttatcaagaatgatgacatcatgaccgttttgcagtaattgcacacaggtatgacttccaatgtaaccgctaccaccggtaaccagaactctcataattcgctccattaggcttatggtatgaaataaccatagcataacaaagatgcgaaaagtgtgacatggaataaattagtggaatcgtttacacaagaatttagccgttttttatgcgcgattaagtgattataaaacagagggtttatgaatgattgcgctttttatctgaaaaaagacgcggtttcatgcctgcatgcgtcgaaccgttggccggagagggtgctaaggccgcctccggcaaggtcagcactaccgactcaatatatttttgtcagcacatagcgatagagtccaccgtccggcacgaactcaagacgatgggtaatacaggcaggcgcatcttcagcgtggtggctaacaaacaacaattgcgtttcaccttcgctaatcagcacatcaacaaaacggcggataagctggcgattcagcggatcaagcccctgtagtggttcatcgagaataagcaacgtcggatgtttcaccagtgcgcggacaatcagcgccagacgctgctgtccccaggaaagactatggaacggagcgtcagccgtgcgtttatcaatgccgagaatatccagccactgctgcaccagtttttgctggcgatcgctaacggcctgataaatgccaatgctatcaaaatagccagaaagaatcacattacgcacggtagtgctgacccggtaatccagatgcaaactactgctgacgtaaccgatatgctttttgatatcccagatggtttcgccgctgccgcgacgtcgtccgaaaagcgtcaaatcgttgctgtaaccttgcggatgatcgccagtaaccaggcttaataacgtgctttttcctgcaccatttggcccgacaatttgccagtgttcgcctggattcacctgccagctaaggttattaagaatggggcgatcgttataagaaaccacgccattgttcagcacaatgcgcggttcgttggcgggtaaggcgtgacgtgcactaggttcatccggctccggcagttgcacaccttcaagctgttcactatgcgccagttgcgcgacgagtgcttgttggagcagttcctctttagcgccagtttccgctaacgtgcaatccgccagcacgccagcaaactggacaaactccgggatctcatcgaagcgattgagcaccagtaccagagtaataccggactgatgtaagctggcgagtcgctcagccagctgctgacgactggcaacatccaggccatcgaacggctcatcaagaatcaacaagtcaggctcgctcatcagcgcctgacacagcagggtttttcgcgtctcgccagtggaaaggtatttaaagcgtcggtcgaggagggcggtaataccgaactgctgcgccagttgcatgcaacgcggtgcatcctttacttcatcctgaatgatctcagccgtagtgcgtccggtgtcatcttcgccagggccgagcatatcggtgttattccgctgccattcgtcgctgacgagtttttgcaattgctcgaaggagagacgagtgatgtgggaaaactggctttgccgttcacctttcaaaagcggaagttcccccgccagcgcgcgggccagggcgcttttcccgcttccattgctaccgacaaacgcccaactatcacccgcgtttaacgttagctgaggcaattgcagcgtttttgtgtcgctaagacgaaacgtgccttgcaaaatttgcaagctactcattttatatcccactttgtgcagcgattactgacagggatacgtgtttcataacaaattgtcaacacgcttagcacagcgtggcgataatcacgctgtcggcattaaagtaggccgtgacattctgtccttgctgaagagaagtcgcttcatttaccggcactgtggcgcacagtgtttgcccgtcgggtagcgccattaatacttcgcactgctctgcgccgcgctcaatatgactaataatacccggtaattggttgtcagcgttttgcgcgaccgcctcgtcctgagtaatacctacccacggcgcttttagcaatatcaacacttctttgccttcatccagccccagacgcgcgccgctttgtgcggtaattgcgactttcaggcgtgtttttccgtcagccagtaagacatcaacatgctgttgaacgtcatcatgatcgcgggcggtgatggtaccgaaccactggttacgggcgctggtttgcagactaaaacgactgatcgcggccagcaggctgttcagcggcagggcgtcatcgtcacttaacacatcaaaggctttttgctggatttgcgccagtaagtcatagagctgaatcagtcgctgaccatagcgggtcagtactgcgccgccgccacctttaccgcctgttgcgcgctcgaccagaatatgctcacttaactgattcatctcgttaatggcatcccaggcgcttttatagctaataccggcatctttcgctccctggctaatggaaccggaaagcgcaatgtgttttagtaggctaatgcggcgcgggtcggcgaataatttttgttggagcttaagggtgagaaggatttcggcctgcataacaatgtcctggcaaaagtcttattgtgacggaaaacgaacgccacgcaaagctgaccgcacaaaaggggagtgcttttctgtgcttagcggttagaatagtctcatgactatatctggagttgaccatgttagagttattaaaaagtctggtattcgccgtaatcatggtacctgtcgtgatggccatcatcctgggtctgatttacggtcttggtgaagtattcaacatcttttctggtgttggtaaaaaagaccagcccggacaaaatcattgattccctgaatgcccgcttagtcgggcattttctttttctcaacttcctgcttttcctgccgatattttttcttatctacctcacaaaggttagcaataactgctgggaaaattccgagttagtcgttatattgtcgcctacataacgttacattaaggggttaccaatggctcgtaaatggttgaacttgtttgccggggcggcactctctttcgctgttgctggcaatgcactggcagatgaagggaaaatcacggtgttcgccgccgcaagtctgactaacgcaatgcaggacattgctacgcagtttaaaaaagagaaaggcgtggatgtggtttcttctttcgctagcagttctactctcgcccgtcagattgaagcgggtgcgcctgcggatctgtttatttctgccgatcagaaatggatggattatgcggttgataaaaaagcgatcgatacagctacgcgtcagacactgctcggcaatagcctggtcgttgtagcaccgaaagccagcgtgcagaaagatttcaccatcgacagcaaaaccaactggactagtctgctgaatggcggtcgcctggcggttggcgatccggaacatgttcccgctggcatttatgcaaaagaagcactgcaaaaactgggcgcatgggatacgctctctccgaaactggccccagcggaagatgttcgtggggcgctggcgctggtcgaacgtaacgaagcgcctctgggcattgtctacggttctgacgcagttgccagcaaaggggtaaaagtggttgccaccttcccggaagatagtcataaaaaagtggaatatccggttgctgttgtggaagggcataacaatgcgacagtgaaagcattttatgattatctgaagggaccgcaggcagcggaaatctttaaacgttacggatttacaatcaagtaatgatactgaccgatccagaatggcaggcagttttattaagcctgaaagtttcttccctggctgtgctgtttagcctgccgtttgggatcttttttgcctggttactggtgcgttgcacgtttccgggcaaagctctgctcgacagcgtactgcatctaccgctggtgttaccgcccgtggtcgtcggttacttattattagttagcatgggacggcgcggatttatcggtgaacgtctgtatgactggtttggtattaccttcgcctttagctggcgcggcgcggttctcgctgccgccgtcatgagctttccgctgatggtgcgggcaattcgtctggcgctggaaggggttgatgtcaaactggaacaggccgcaagaacactgggggccgggcgctggcgcgttttctttactatcacgttaccgctgaccttaccgggaattattgttggtacggtactggcttttgctcgttctctcggtgagtttggtgcaaccatcacctttgtgagcaacattcctggtgaaacgcgaaccattccttctgccatgtataccctgatccagacccccggcggggaaagtggagcggcgagactgtgcattatttctattgcgctggcgatgatctccctgttgattagtgaatggctggccagaatcagccgtgaacgggcggggcgctaatcatgctggaactgaatttttcccagacgttgggcaaccattgcctgactattaatgaaacgctgcccgccaatggcatcactgctatctttggcgtctccggtgccggaaaaactagcctgattaacgccatcagtggactgacgcgcccgcaaaaagggcggattgtcctcaatgggcgggtactaaatgatgccgaaaaaggtatctgcctgacgccggaaaagcgtcgcgttggctatgtttttcaggatgcgcggctgttcccgcattacaaagtgcgtggcaatctgcgctacggcatgagcaaaagtatggtcgatcagttcgataagctggtggcgcttttaggcattgaaccgttgcttgaccgtttaccaggcagcctgtccggaggcgaaaaacagcgcgtggcgattggtcgggctttgctgacagcaccggaattgctgttgctggatgaaccgctggcgagtctggatattccgcgtaaacgcgaactgttgccttatctgcaacggctgacacgggaaatcaacattccgatgttgtatgtcagccatagcctggatgagatcctccatctggcagacagagtgatggtactggaaaacggtcaggtgaaagcctttggcgcgctggaggaagtgtggggcagtagcgtgatgaatccgtggctgccgaaagagcaacaaagtagcattctgaaagtgacggtgcttgagcatcatccgcattacgcgatgaccgcgctggcgctgggcgatcagcatttgtgggtcaataagctggacgaaccgctgcaagctgcgctacgtatccgcattcaggcttccgatgtttctctggttttacaaccgccgcagcaaaccagcattcgtaacgtattgcgggcaaaagttgttaatagttatgacgacaacggccaggtggaagtggaactggaagtcggcggtaaaacgctgtgggcgcgtatcagcccgtgggccagggatgaactggcgatcaaacctggcctgtggctgtacgcgcaaattaaaagtgtgagcataaccgcctgattaaatcaggtggctataaatgaactgggcaatgctgtcggtggtgttatcaccaatcacaatgttggcgcgcgcttttaccgcgtcatcggcgttgcccatcgccacgcctgtaccagcggcttccagcatactgatatcattaaagttatcgccgaatgccacgacgttttccatgctccaaccttgcgcctcaacccatttcgtcaaacgtttacctttgctgttgccgccgcgtgcaatatcaacctgatcgtgccaggaccattcacactccagtcccagttcatgttcgacatgcttaccaaaatgctgcaattgcggcaggtcatcgtgcgtcagggcgaacttccatacggcgttaacttgttgcgccgtttcagccagagaagcgacttgtgtgaaagtcggacgctgttccggcggcagggtttgcgcccagttagatgtgcgaatgacatgcccggtcgggtgctcatagaccattgcatcatcgacatacatcagaccgtgaatgtggtgttcattcagcatctcaatgagttgcagggctttaataacgggcattgggtccgcttccagcacggtttttgcatgataatcatacaaataggtgccattacagcaaatagcaggtgtatccagcgccagcgcctgataaaaaggatgaatagcgacgtgatggcgacctgtgacgatgattaattgatagcctgcttcgcgagcgcgggccagggcttctatgctactaggaagcagggtctttttcggggtcaataaggtgccgtctaagtcgagagcaatcacgcgtgtggtcatggcgtattccagattaaggttaagaattttcgtctgcgcgaatggtacaccgataccactatcggacaaaattctgcgttttaattcagcattcaccgccaaaagcgactaattttagctgttacagtcagttgctaaatgcaaaggagcattcatgaagcaaacagtttatatcgccagccctgagagccagcaaattcacgtctggaatctgaatcatgaaggcgcactgacgctgacacaggttgtcgatgtgccggggcaggtgcagccgatggtggtcagcccggacaaacgttatctctatgttggtgttcgccctgagtttcgcgtcctggcgtatcgtatcgccccggacgatggcgcactgacctttgccgcagagtctgcgctgccgggtagtccgacgcatatttccaccgatcaccaggggcagtttgtctttgtaggttcttacaatgcgggtaacgtgagcgtaacgcgtctggaagatggcctgccagtgggcgtcgtcgatgtggtcgaggggctggacggttgccattccgccaatatcagtccggacaaccgtacgctgtgggttccggcattaaagcaggatcgcatttgcctgtttacggtcagcgatgatggtcatctcgtggcgcaggaccctgcggaagtgaccaccgttgaaggggccggcccgcgtcatatggtattccatccaaacgaacaatatgcgtattgcgtcaatgagttaaacagcagtgtggatgtctgggaactgaaagatccgcacggtaatatcgaatgtgtccagacgctggatatgatgccggaaaacttctccgacacccgttgggcggctgatattcatatcaccccggatggtcgccatttatacgcctgcgaccgtaccgccagcctgattaccgttttcagcgttagcgaagatggcagcgtgttgagtaaagaaggcttccagccaacggaaacccagccgcgcggcttcaatgttgatcacagcggcaagtatctgattgccgccgggcaaaaatctcaccacatcagcgtatacgaaattgttggcgagcaggggctactgcatgaaaaaggccgctatgcggtcgggcagggaccaatgtgggtggtggttaacgcacactaaccgctgatttacccggcgcagtctctcctgcgccggtgtattaacctatctcctgtaacgcgtgtctctggcgttcgacgatattggtccacaaattgtctttatcgtcagtccataaattaatcagcaaggcaaaaaagcgttctgctgctggagaaagtacggcatctttacggcgaattattcccaatgttcgacgtataacgggttccaccaatgggataccaataatgctagaatagggcgcatgaggcattgccaggccaggaagcgcgctaatccccagtcccgcctccaccagtcctaaactcgtgctaagatgacgcacttcgtaaaaccagtccagcttccagggcttgtcggccagctgttgttctatcaacagtcggttgccgctggaggagcgtacgccaatcattttgtaacccactaactcctgccattctacaagctgctttttggccaatggatggtcacgccgacaggccagcacgaacggctcgttgaccagtggggtaaaatcaatggaactatttgtgacgttgttcatgtttatgccaaagtcactttcgttacacagcacgctttccatgcaattattcgtgccttgttccagaatccgcactttaatattgggatacagctcattaaatttaccgattgccagcggtaaaaaataaaatactgcggtcggaatacacgctaacgtcaccataccacgatgataagcattcatatcacgaatattaaaaagcgtttcatcgaatttctttattaattcccgcgcctccgggagcaacctttttcctgcttttgttaacgtaaccttgcgagttgtacgctcaaatagttgaacatgtaaatcttcctccatcttttttattcttcgcgttaatgcaggttgcgtaatattgagtaatttagcggcattgttaaagctactggactctgccagtatgacaaatgccttcatactacttaattcatgcttcattattactccggaaaatggaaggctgctttttgggtggctggccgttaaaaattttaactgcatttagccaacttaaattaatgaaaaaatgttattaatcgttgagctaaagtcattagagatgctttgcccttaatgtaaccatatcgcaataagttatgtttttaaattgagggcattattatgaaaaaaataccctgcgtgatgatgcgaggtggaaccagcaggggcgcgttcctgttagcggaacatttacccgaagatcaaacgcagcgcgataaaatattgatggcaattatgggttccggtaacgatctggaaattgacggtattggcggcggtaatccactgaccagtaaagtcgccattattagccgttccagcgatccgcgtgctgatgtcgattatctgtttgcgcaggtaatcgttcatgagcaacgtgtcgataccacgcctaactgcggcaatatgctgtctggtgttggggcattcgccattgaaaatggtttgattgcagcgactagcccagttactcgcgtacgtatccgcaacgtcaatacgggtacgttcatcgaagctgatgtgcaaacgccaaatggtgttgtcgagtacgagggtagcgccagaattgacggcgtaccgggtactgccgcaccggttgcgctcactttcctgaatgccgctggaaccaaaaccggaaaagttttcccgactgataatcagattgattattttgacgatgtcccggtgacctgtatcgatatggcgatgccagtcgtcattattccggctgaatatctgggaaaaacaggttatgaattaccggcggaactggatgccgacaaagcattattagcccgcattgaatctatccgtctacaagcgggtaaagcaatgggcttaggtgatgtcagtaatatggttatccctaaacctgtgcttatttctccagcgcagaaaggcggggcaattaatgtgcgttattttatgccgcattcttgccatcgcgcgctggcgataaccggtgctattgctatttccagtagttgtgcattggaaggcaccgtcacccgacaaatcgtcccttctgtaggatacggcaatatcaatattgaacaccccagtggtgcgctcgacgttcatttaagtaatgaaggtcaggatgccacgacgttacgcgcatctgttattcggacgaccagaaaaatattttccggtgaagtttatcttccctgaaaaaattcgttgtcaggataaggacaatcaataaaggacttctgtatgagtcatacagaaagaacaggattttaaatgaataagaaaagcttatggaagctaattctgatattagcgatcccatgtattattggttttatgccagctccggcaggattaagcgaactggcgtgggtgctttttggtatttacctggcggccattgtggggctggttatcaagcctttcccggaacctgtcgtactgttaattgccgttgctgccagtatggtggtggtcggtaacttatccgacggtgcgtttaaaaccaccgccgtattaagcggttactctagtggtaccacctggctggtgttcagcgcgtttaccttaagcgccgcatttgtgaccaccggtttaggtaaacgtattgcctatctgctgattggtaaaatcggtaacaccacgctgggtctgggttacgttacggtattcctcgatctggtactggctccggcaacaccgtctaacaccgcgcgtgcgggcggcattgtgttaccgatcatcaacagcgtggcggtggctttggggtccgaaccggaaaaaagtccgcgtcgtgtcggacattacctgatgatgtccatttacatggtcaccaaaaccaccagctatatgttctttaccgcaatggcggggaacattctggcgctgaaaatgatcaacgacattctgcacctgcaaattagctggggtggatgggcgctggcagccggattgccgggcatcattatgctgctggtcaccccgctggtgatttacaccatgtatccaccagaaattaagaaggtggataacaaaaccatcgctaaagcgggccttgccgaactaggaccgatgaaaatccgcgaaaaaatgctgctcggtgtctttgtgctggcgctgctgggctggattttcagtaagtctctgggggttgatgaatccaccgtggcaatcgttgttatggcaaccatgctgctgctgggtatcgttacctgggaagacgtggttaaaaataaaggcggctggaataccttaatctggtacggcggtattatcggcttaagctccttattaagcaaagttaaattcttcgaatggttagctgaagtctttaaaaataacctggcatttgatggtcacggtaacgttgctttcttcgttattattttcctcagcattatcgtgcgttatttcttcgcttccggtagtgcctatatcgttgctatgttaccggtatttgccatgctggcgaacgtctccggcgcaccgttaatgttaaccgcgctggcactgttgttctccaactcctatggcggcatggttactcactatggcggcgcggcaggtccggtcatctttggcgtgggttataacgatattaaatcctggtggttggtcggtgcggtactgacgatattaaccttcctggtgcatatcaccctcggcgtgtggtggtggaatatgctgatcggctggaacatgctgtaaatattctcgtcatacttcaagttgcatgtgctgcgtctgcgttcgctcaccccagtcacttacttatgtaagctcctggggattcactcgcttgtcgccttcctgcaactcgaattatttagagtatatccatttattatctttctgcgcacttcacggtgcgcagatatctggagcatttgatgatcaagttatctgaaaaaggcgtgtttctcgccagtaataacgaaataattgccgaagaacatttcaccggcgaaattaaaaaagaagaagccaaaaaaggcactattgcctggtctattctctctagccataatacgtccggaaatatggataaacttaaaattaagtttgatagtttagcctctcacgatattacctttgttggtattgtacagaccgctaaagcgtccggtatggaacgtttcccgctgccgtatgtgctgaccaactgccataacagtctctgcgccgtcggcggcactattaacggtgatgaccatgtttttggtttaagcgcggcccagcgttatggcggtatttttgtgcctccgcatattgcggtcatccatcaatatatgcgtgagatgatggcaggcggcggcaaaatgatcctcgggagtgacagccacacccgttacggtgcattagggacaatggcagtcggtgagggcggcggtgagttggtaaaacagctgcttaatgacacctgggatatcgactatccgggcgtggttgcggtgcatctgaccggaaaacctgcgccgtatgtggggccacaggatgtggcgctggctatcattggcgcggtgttcaaaaacggttacgtcaaaaacaaagtcatggagttcgttggaccgggcgttagcgcgctctctaccgatttccgtaacagcgttgacgtgatgaccactgaaacgacctgtttaagttctgtctggcaaaccgatgaagaagtccataactggctggcgctgcacggtcgcggccaggattactgccagcttaaccctcaaccgatggcgtactacgatggctgcatcagcgttgatttaagcgccatcaaaccaatgattgcgctgccgttccacccgagcaacgtgtatgaaatcgacacactgaaccagaacctgaccgacattctgcgtgagattgaaattgagtccgaacgcgtggcgcacggtaaagccaaactcagcctgctggataaagtggaaaatggtcgcctgaaagtgcagcaggggattatcgcgggctgttctggcggtaactacgaaaacgtcatcgcggcggcgaatgcactgcgcggtcaatcctgtggcaatgacaccttcagcctggcagtttacccgagtagtcagccggtgtttatggatctcgccaaaaaaggtgtggtagcagatttgattggcgcaggcgcaatcatcagaaccgcgttctgcggcccatgctttggcgcgggcgatacgccaatcaacaacggtttgagtattcgccacaccacgcgtaacttcccgaaccgcgaaggctctaagccagctaatgggcagatgagtgcggtggcgttgatggacgctcgttctatcgctgcgactgcggcaaacggtggctatttaacctctgccagcgaacttgattgctgggacaacgtgccggagtacgccttcgatgtaacgccgtataaaaaccgtgtttatcagggctttgtgaaaggggcaactcagcaaccgctgatttacgggccgaacattaaagactggccggaattgggtgcgctgactgacaatatcgtcctgaaagtgtgcagcaagatcctcgacgaagtgaccaccaccgacgaactgattccttccggtgaaacctcttcttatcgtagtaatccgattggtctggcggagtttaccctgtctcgccgcgatcccggttatgttagcagaagtaaagcgactgctgagctggaaaatcagcgtctggcggggaatgtcagcgagctgacagaggtgtttgcgcgcattaagcagattgctggtcaggagcatattgatccgctgcaaactgaaattggcagcatggtctatgcggtgaaaccaggcgatggttctgcgcgtgaacaggcggcgagctgccagcgtgtgattggcggtctggcgaatattgccgaggagtacgcgactaaacgctatcgttctaacgtcatcaactgggggatgttaccgctgcaaatggcggaagtaccaacctttgaagtgggggattacatttacatccctggcattaaagcggcgctggataatccgggtacgacgtttaaaggttatgtgatccatgaagatgcgccggtaacggaaattacgctctatatggaaagtctgactgctgaagagcgcgagattatcaaggcgggtagtttgattaacttcaataaaaaccgtcagatgtaaaaagcgccatgtgaatgtaggtcgcattcggcacttattgtcggatgcgatgcttgcgcatcttatccgacctacgaatcgcatcgaatctgtaggccagataaggcattttcgcagcatccggcacttattgtcggatgcgatgcttgcgcatcttatccgacctacaaatcgcatcgaaccgtaggccggataaggcgtttacgccgcatccggcaaatagttaattgcccttacttcttcgcctctgcaaccactttactacccacgccgcggttattgtattcccacatgcggttgtagttagtgtcattcagattgcgctgtatttcgtcgttatcatctacgctgccggtattacccgcaaacggacgattagagatcaccgcatcggcccacggtttagccgtgttaaaaccttcgttgatggcgctatcacggatcaccacctgaccgttggtattggcatcaacatccaggctgcggcccagttgcgccacaccatcaccgaaagcattgaaacggctgtttacggcgaggaaaccgtagtaaatgttggacagcgtagccggtgcaaacacatacgcttcttgctgagtacgactgttcaccacgcggaattcggtgttatcgaacaccactgcgccgcgaccagaaacgatatccacatccccttcaatgtagctgttggtcaccagcgtacgcggctgacgattcgtttccagacggttctgcacaccgctgttggtgacaaagaaggtgttctgacgaccgagaatgttaacgttgttaatctgtacctggtcaccatcagtacgcagtgccaccgccggatggttacctgcatctacgctatcgcccagcgtgttttcgatggtcagattttgcagttgcaggccattgttttgactccagaagaccgcagagcagagaacaccgatactgtcgctgcgtttgctctggcagctatcgtacatataccacgctggtttacctggcatatatttgccgcgcgggttgacgtcgtgacgccagtcggcagggctcatgccaccattaagggaaagcccaatcttcacatcaatcggtttttcacctgtaccgtacagagtaattccacccggagcggcagggacatataccgttccctgatactcaccaggcatcacggcaatatactggcgcttgttggtacgcttgataattgccgcatctaccgccgcctgaatcgtggtatgcgttacaccttgagtgcccgccgggccgacaacaaagtcaggttgcgcaggcagggtaatcggggaaggattccacgctgcagcacctggtgtcagggatgcaaaatagtgttgagcatcgaaattctgcgcttcttttgcgctcagaatcgggcgagaagaggtaccaggcgcggtttgatcagaaggacgttgatcgggcggggtactgctacaggcggtcagcgtcacgccaaaagccaatgccagcgccagacgggaaacactaaatgtgttcacaggttgctccgggctatgaaatagaaaaatgaatccgttgaagcctgcttttttatactaacttgagcgaaacgggaaggtaaaaagacaaaaagttgtttttaatacctttaagtgataccagatggcattgcgccatctggcagagtgattaactaaacatcgcagtaatgctggcgcttgccagagagtggaaatgaacgttaaacccgaccatcgcgccgctggcaccttcatcgacatcaatacgttctatatccagcgcgtgaacggtaaaaatgtagcgatgagtttcgcctttcggcggtgctgcgccatcgtacccggttttaccaaagtcggtacgcgtctgcaaaacgccgtctggcattgctaccagaccagagccaaacccttgcggtaatacgcgggtatcagcgggtaagttaacaactacccagtgccaccagccggagccggttggcgcatccgggtcgtagcaggtgacaacaaaacttttcgttcccgcaggaacatcatcccacgccagatgcggactaatattatcgccatcgtaacccatgccgttaaagacatgacgatgcggcaatttatcgccatcgcgcagatcgttactgatgagtttcatgaaccctcctttcttgtttgcagaaagtgtagccagaaaccctcacgcggacttctcgttattggcaaaaaaatgtttcatcctgtaccgcgcggttaaccgctgcggtcagacgctgcaactgttgcgggagaataatatagggcggcatcaggtaaatcagtttgccaaaaggccggatccagacaccctgttcgacaaagaatttttgcagcgccgccatattcaccggatgagtggtttcgaccacgccaatggcccccagtacgcgcacatcggcaaccatttcggcatcacgggcgggggcaagttgctcgcgcagctgtacttcaatatccgccacctgttgctgccagtcgccagattcgagaatcgccaggctggcgtttgctgccgcgcaggccagcggattgcccataaaagttggcccatgcataaagcaaccggcttcaccgttactgatggtttctgcaacctcgcgcgtggtgagtgtggcggaaagggtcattgtgccgccggttaaggctttaccgaggcacaaaatgtccggcgcgatttctgcatgttcacaggcaaacagtttcccggtacgaccaaatccagtggcgatctcgtcggcaatcagcaagataccttcgcgatcgcatattttgcggattcgttttaaccattccggatggtacatgcgcatcccgcctgcgccctggacaatcggctcaatgatcaccgccgcgatttcatgacgatgcgccgccatcaggcgggcaaagcccaccatatcgcgctcatcccattcgccatccatgcggctttgcggggcgggagcaaacaggttttctggcaggtagcctttccacagactgtgcatactgttatccggatcgcacacgctcatcgcgccaaaggtatcgccatgataaccattgcggaaggtcagaaaacgctggcgcgcttcgcctttggcttgccagtactgcaacgccattttcatcgccacttccaccgctacggaaccggagtccgcgagaaaaacgcactccagcggttgcggcgtcatcgccaccagtttgcggcacagctcaatggctggcgcatgggtgataccgccaaacatcacatggctcatggcatcaatttggctcttcatcgccgcattaagctgcgggtgattgtagccgtggatcgccgcccaccaggagctcataccgtcaaccaggcgtctgccgtcagacaaaatcagctcgcaaccttcggcgctcaccaccggataaaccggcagaggggaggtcatggatgtgtatgggtgccagatatggcgttggtcaaaggcaagatcgtccgttgtcataatcgacttgtaaaccaaattgaaaagatttaggtttacaagtctacaccgaattaacaacaaaaaacacgttttggagaagccccatggctcaccgcccacgctggacattgagccaagtcacagaattatttgaaaaaccgttgctggatctgctgtttgaagcgcagcaggtgcatcgccagcatttcgatcctcgtcaggtgcaggtcagcacgttgctgagcattaagaccggagcttgtccggaagattgcaaatactgcccgcaaagcagccgctacaaaaccgggctggaagccgagcggttgatggaagttgaacaggtgctggagagcgcgcgcaaagcgaaagcggcaggaagcacgcgcttctgtatgggcgcggcgtggaagaatccccacgaacgcgatatgccgtacctggaacaaatggtgcagggggtaaaagcgatggggctggaggcgtgtatgacgctgggcacgttgagtgaatctcaggcgcagcgcctcgcgaacgccgggctggattactacaaccacaacctggacaccagcccggagttttacggcaatatcatcaccacacgcacttatcaggaacgcctcgatacgctggaaaaagtgcgcgatgccgggatcaaagtctgttctggcggcattgtgggcttaggcgaaacggtaaaagatcgcgccggattattgctgcaactggcaaacctgccgacgccgccggaaagcgtgccaatcaacatgctggtgaaggtgaaaggcacgccgcttgccgataacgatgatgtcgatgcctttgattttattcgcaccattgcggtcgcgcggatcatgatgccaacctcttacgtgcgcctttctgccggacgcgagcagatgaacgaacagactcaggcgatgtgctttatggcaggcgcaaacagcattttctacggttgcaaactgctggccacgccgaatccggaagaagataaagacctgcaactgttccgcaaactggggctaaatccgcagcaaactgccgtgctggcaggggataacgaacaacagcaacgtcttgaacaggcgctgatgaccccggacaccgacgaatattacaacgcggcagcattatgagctggcaggagaaaatcaacgcggcgctcgatgcgcggcgtgctgccgatgccctgcgtcgccgttatccggtggcgcaaggagccggacgctggctggtggcggatgatcgccagtatctgaacttttccagtaacgattatttaggtttaagccatcatccgcaaattatccgtgcctggcagcagggggcggagcaatttggcatcggtagcggcggctccggtcacgtcagcggttatagcgtggtgcatcaggcactggaagaagagctggccgagtggcttggctatagccgggcactgctgtttatctctggtttcgccgctaatcaggcagttattgccgcgatgatggcgaaagaggaccgtattgctgccgaccggcttagccatgccagtttgctggaagctgccagtttaagcccgagccagcttcgccgttttgctcataacgatgtcactcatttggcgcgattgcttgcttccccctgtccggggcagcaaatggtggtgacagaaggcgtgttcagcatggacggcgatagtgcgccactggcggaaatccagcaggtaacgcaacagcacaatggctggttgatggtcgatgatgcccacggcacgggcgttatcggggagcaggggcgcggcagctgctggctgcaaaaggtaaaaccagaattgctggtagtgacttttggcaaaggatttggcgtcagcggggcagcggtgctttgctccagtacggtggcggattatctgctgcaattcgcccgccaccttatctacagcaccagtatgccgcccgctcaggcgcaggcattacgtgcgagcctggcggtcattcgcagtgatgagggtgatgcacggcgcgaaaaactggcggcactcattacgcgttttcgtgccggagtacaggatttgccgtttacgcttgctgatagttgcagcgccatccagccattgattgtcggtgataacagccgtgcgttacaactggcagaaaaactgcgtcagcaaggctgctgggtcacggcgattcgcccgccaaccgtacccgctggtactgcgcgactgcgcttaacgctaaccgctgcgcatgaaatgcaggatatcgaccgtctgctggaggtgctgcatggcaacggttaataaacaagccattgcagcggcatttggtcgggcagccgcacactatgagcaacatgcagatctacagcgccagagtgctgacgccttactggcaatgcttccacagcgtaaatacacccacgtactggacgcgggttgtggacctggctggatgagccgccactggcgggaacgtcacgcgcaggtgacggccttagatctcagcccgccaatgcttgttcaggcacgccagaaggatgccgcagaccattatctggcgggagatatcgaatccctgccgttagcgactgcgacgttcgatcttgcatggagcaatctcgcagtgcagtggtgcggtaatttatccacggcactccgcgagctgtatcgggtggtgcgccccaaaggcgtggtcgcgtttaccacgctggtgcagggaagcttacccgaactgcatcaggcgtggcaggcggtggacgagcgtccgcatgctaatcgctttttaccgccagatgaaatcgaacagagcctgaacggcgtgcattatcaacatcatattcagcccatcacgctgtggtttgatgatgcgctcagtgccatgcgtagcctgaaaggcatcggtgccacgcatcttcatgaagggcgcgacccgcgaatattaacgcgtagccagttgcagcgattgcaactggcctggccgcaacagcaggggcgatatcctctgacgtatcatctttttttgggagtgattgctcgtgagtaaacgttattttgtcaccggaacggataccgaagtggggaaaactgtcgccagttgtgcacttttacaagccgcaaaggcagcaggctaccggacggcaggttataaaccggtcgcctctggcagcgaaaagaccccggaaggtttacgcaatagcgacgcgctggcgttacagcgcaacagcagcctgcagctggattacgcaacagtaaatccttacaccttcgcagaacccactagcccgcacatcatcagcgcgcaagagggcagaccgatagaaagtttggtaatgagcgccggattacgcgcgcttgaacaacaggctgactgggtgttagtggaaggtgctggcggctggtttacgccgctttctgacactttcacttttgcagattgggtaacacaggaacaactgccggtgatactggtagttggtgtgaaactcggctgtattaatcacgcgatgttgactgcacaggtaatacaacacgccggactgactctggcgggttgggtggcgaacgatgttacgcctccgggaaaacgtcacgctgaatatatgaccacgctcacccgcatgattcccgcgccgctgctgggagagatcccctggcttgcagaaaatccagaaaatgcggcaaccggaaagtacataaaccttgccttgttgtaaccattctgtatttggttaaattgcgagcgagatcgcgtcttcgattgactgcaatttaaccaattaaattctaaaataatcacgaaaaaaattttacttccgcctcatgcggcgaatgtgggaattgcccaggcggcgggggataggggctggagacagttatccactattcctgtggataaccatgtgtattagagttagaaaacacgaggcaagcgagagaatacgcggcttgcacgcgaattggcgttaaagacggctcaaagaaatatcttttattttttaactggttagataaatgcaatggcagtcactgaacaggcatctcttgccataaaactgtcatcactcatcttgacaaatgttaaaaaagccgttgctttggggataacccggtaaggccggagttttatctcgccacagagtaaattttgctcatgattgacagcggagtttacgctgtatcagaaatattatggtgatgaactgtttttttatccagtataatttgttggcataattaagtacgacgagtaaaattacatacctgcccgcccaactccttcaggtagcgactcatgagtaaaccgttcaaactgaattccgcttttaaaccttctggcgatcagccagaggcgattcgacgtctcgaagaggggctggaagatggcctggcgcaccagacgttacttggcgtgactggcagtgggaaaaccttcaccattgccaatgtcattgctgaccttcagcgcccaaccatggtacttgcgcccaacaaaacgctggcggcccagctgtatggcgaaatgaaagagttcttcccggaaaacgcggtggaatatttcgtttcctactacgactactatcagccggaagcctatgtaccgagttccgacactttcattgagaaagatgccagcgttaacgaacatattgagcagatgcgtttgtccgccaccaaagcgatgctggagcggcgtgatgtggttgtggtggcgtctgtttccgcgatttatggtctgggcgatcctgatttatatctcaagatgatgctccatctcacggtcggtatgattatcgatcagcgcgcgattctgcgccgactggcggagctgcaatacgctcgtaatgatcaagcattccagcgtggtactttccgcgttcgtggcgaggtgatagatatcttcccggcagaaagcgatgacattgcacttcgcgtggaactgtttgacgaggaagtggaacgattgagcttatttgacccgctgaccgggcagattgtttccactattccacgttttaccatctacccgaaaacgcactacgtcacaccgcgcgagcgcatcgtacaggcgatggaggagatcaaagaagagctggccgccagacgcaaagtgctgttggaaaacaacaaactgctggaagagcagcggctgacccagcgtacccagtttgatctggagatgatgaacgagctgggctactgtagcgggattgaaaactacagccgcttcctctccggtcgtggaccgggtgagccaccgccgacgctgtttgattacctgcctgccgatgggctgctggtcgtcgatgaatctcacgtcaccattccacaaattggcggcatgtatcgcggtgaccgggcgcgtaaagagacactggtggagtacggcttccgcctgccaagtgcgctggataaccgtccgcttaagtttgaagagttcgaagcattagcgccgcaaaccatctatgttagcgcgacgccgggtaattacgagctggaaaaatccggcggcgatgtggtggatcaggtggtgcgtccaaccggattgcttgacccgattatcgaagtgcggccggtggcgacacaggttgatgatcttcttagcgagattcgtcagcgagcggcaattaacgaacgcgtactggtcaccacactgaccaagcggatggcggaagatcttaccgaatatctcgaagaacatggcgagcgcgtgcgttatcttcacagtgatatcgacaccgtcgaacgtatggagattatccgcgacttgcgtctgggtgagttcgacgtgctggtagggatcaacttactgcgcgaaggtctggatatgccggaagtgagcctggtggcgatcctcgacgctgacaaagaaggcttcctgcgttccgaacgtagcttgatccagaccattggtcgtgcggcacgtaacgttaacggtaaagcgattctctacggcgataagatcaccccaagtatggcgaaagcgattggcgaaaccgaacgtcgccgtgagaaacagcagaagtacaacgaggaacacggaattacgccgcaaggcttgaacaagaaagtggtcgatatcctggcgctggggcagaacattgccaaaaccaaagcgaagggcagaggaaaaagccgcccgattgttgagccggataatgtgccgatggatatgagccctaaagcgttgcagcagaaaatccatgagctggaagggttgatgatgcaacacgcgcagaatctggagttcgaagaagcggcgcaaattcgtgaccagttgcatcagctgcgtgagctgtttatcgcggcaagctaacaggatagcgaagaagactgatgacaaacggaaaacagcctgatgcgctacgcttatcaggcctacattttctccgcaatatattgaatttgcgcggtttgtaggccggataaggcgttcacgccgcatccggcataaacaacgcgcactttgtcttcaataggaagccggaattttccttcggatttccgttaacctaaagcctgtaacgccttttccagcgcgttatgtaacaactggcggtcatgacgatacggaatatcgctggcctccagtacctcctggatcacaatccgctctttcaccgcgctgacatccacttttggcccgacgatgaccgcatcaatgacctttttaccaacatactgctccataattgccagcttgctttccagcttcaaattagccgcaggtaaactcaactcacgccccagattgccgatataaaccatcggcgctggcgtgcggcgtaatgcctgggcgatttccttcagcagcagaattggcatcaggctggtataaaaactgccaggcccaataatgatgagatccgcttcattgatagcgtgaaccgcctcacgcgttgcgggtacattaggcgttaacaataactcttgaatcggcgtagttaactggtcgatattgacctcgccgtaaacttcatgcccctgatcgtcaatcgccatcagatcaacaggatgctcactcattggaatcaaatgcgtatccactttcagcagattacgaattaaattgatggcttccagaggccgcacgctaaggtgatccagcgcctttaacatcaagtttccgagattatgaccggaaagttcgccattgccaccaaaacggtattcaaacatcgcggaggcgacgctcggttccgttatcagctggttgaggcagttgcgcatatcgccccaggcaatgccgccttcactacggcgaatacgccccgtgctgccaccattatcggtggtggtgacgatacccgttaaacgagaacccaaagagctaagactactgagaacgcgtcccagtccatgccctccgccgagagcaacgacacgatcaagatcagccagcgtacgattgcgcatatagtttcctggagtcagattatccgcgctacagtagcgcaaattgcggggaaacagcaattaacctgccaatattgaggatacaaactattttcttctacctctaaaggacgatgcacgctatgcctccctgatgatgtatatcaaagtaaaaccgccattttcccttattctgtagcgaaatagcacgatcatgacgctatatacatgattacatagcgaaagtgtggatggtaaaaatctcatttacacgctagtatcggcataaccactaaacactctagcctctgcacctgggtcaactgatacggtgctttggccgtgacaatgctcgtaaagattgccaccagggcgaaggaagaaatgacttcgcctcccgtatctggaaaggtgtacatggctagtcaactgactgatgcatttgcgcgtaagttttactacttgcgcctgagcattaccgatgtgtgtaactttcgttgcacctactgcctgccggatggctacaaaccgagcggcgtcaccaataaaggctttcttaccgtcgatgaaattcgccgggttacgcgcgccttcgccagactgggcaccgaaaaagtgcgcctgacaggaggagagccgtctttacgccgcgactttaccgatatcatcgccgctgtgcgggaaaacgacgctatccgccagattgcggtcacaaccaatggttaccgtctggaacgcgatgtggcgagctggcgcgatgcgggacttactggcattaacgtcagtgtcgacagtctggacgcccgccagtttcacgctattaccgggcaggataaattcaaccaggtcatggcagggattgatgctgcatttgaggccggttttgagaaggtcaaagtcaataccgtgctgatgcgtgatgttaatcatcaccagctcgacacctttctgaactggatccagcatcgccctatccagctgcgtttcatcgaactgatggaaacgggcgagggcagcgagctcttccgtaagcatcacatctctggtcaggttctgcgtgacgagctactgcgtcgcggctggatccaccaattacgtcaacgcagcgacggtcccgcgcaagtcttttgccatccagattacgccggagagattggccttatcatgccgtatgaaaaagacttctgcgccacttgcaaccgcctgcgcgtttcctccattggtaaactccatctctgcctgtttggtgaaggcggcgttaacctgcgcgatctgctggaagacgatacccagcaacaggcgctggaagcgcgtattagtgcggcgctgcgggagaagaaacagacccatttcctgcatcaaaacaacaccggtattacgcaaaacttaagctacattggcggctaaaacgtcaaaaggagagatcagatgagtcaggtaagcactgaatttatcccgacccgtattgctattcttacggtttctaatcgtcgcggtgaagaagacgatacctccggtcactatctgcgcgatagcgcgcaagaagcgggccatcacgttgtcgataaagccattgtgaaagaaaaccgctacgctattcgcgctcaggtatctgcgtggatcgccagcgacgatgtacaagtggtattgattacgggtggtactggcctgacggaaggtgatcaggctcccgaagcattgctgccgttgttcgaccgtgaagttgaaggttttggtgaagtgttccggatgttgagctttgaagagattggcacttccacgttgcaatctcgtgcggtagcgggcgtcgccaacaaaacgctgattttcgccatgccgggtagcaccaaagcgtgccgtaccgcatgggaaaatatcatcgcgccgcagctggatgcccgtacgcgtccgtgtaatttccatccacatttgaagaaataagtatgagccaactgacccatatcaacgccgctggcgaagcgcacatggtggatgtctccgccaaagcggaaaccgtgcgtgaagcgcgggcggaagcctttgtcaccatgcgcagcgagacgctggcgatgattattgatggtcgccaccacaaaggcgacgtatttgccactgcgcgtattgccggtattcaggcggcaaaacgcacctgggatctgatcccgctctgtcatccgctgatgctcagcaaagttgaagtcaatttacaggccgagccggagcacaatcgggtgcgtatagaaaccttatgccgcctgaccgggaaaaccggtgtcgaaatggaagcattaaccgcggcctccgtggcggcgctgaccatttatgacatgtgcaaagcggtgcaaaaagatatggtgattggtccggtacgtttgctggcgaagagcggcggcaagagcggtgactttaaggtggaagcggatgattaaagttctttttttcgcccaggtgcgcgagttggtgggaacagatgcaaccgaagtggctgcggatttcccaactgttgaagcgttacgccagcacatggctgcgcagagcgatcgctgggcgctggcgctggaagatggcaaattactggctgccgtcaaccagacgctggtgagttttgaccatccgctgactgacggcgacgaagtagctttcttcccgccggtaaccggaggttaagatggcagaaaccaaaattgttgttggtccgcagccgttcagcgtaggagaagagtacccgtggctggcggagcgtgacgaagacggtgcggtagtcacctttactggtaaggtgcgcaaccataacctgggcgacagcgtcaacgcattaaccctcgaacactatccggggatgactgaaaaagcactggcagaaattgttgatgaagcgcgtaaccgctggccgctggggcgcgtcactgtgattcaccgcatcggggaattatggccgggcgatgaaatcgtttttgtcggtgtcaccagtgcgcatcgcagcagtgcgtttgaagccgggcagtttattatggattatctcaaaacccgcgcaccgttctggaagcgcgaagccacgccggaaggcgaccgctgggttgaagctcgggagagcgatcagcaggcggcaaaacgctggtaattttttgttagccggataaggcaccgctgcgtccggcaatttcaccgctcagtacatacgtttacgctgcgtcgatgcacagcctcatcattttgcagtatccttaagatattccttatatcttcaggagatcgtcatggacagattcccacgttctgatagtatcgtacaaccccgggctggcttgcaaacttatatggctcaagtctatggctggatgaccgttggcttgttgctgaccgcatttgttgcctggtatgcggctaattccgcggccgtgatggagctgttgttcactaaccgtgtctttttaatcggtctgatcatcgcgcaattagcattggttattgtgttaagtgcgatgattcaaaagctgagcgcaggtgtaacgacgatgctctttatgctttatagcgcgctgacgggtcttacgctttccagtatattcattgtctataccgctgcttctatcgccagtactttcgtcgttactgccgggatgttcggcgcaatgagcctgtacggttacaccacgaagcgcgatttaagtggctttggcaatatgctgtttatggcgttaatcggcattgtgctggcaagcctggtcaacttctggttgaaaagcgaagcattgatgtgggcagttacctacatcggcgtgattgtctttgtcggattgacggcgtatgacacgcagaaactgaaaaatatgggtgagcagattgatacccgcgacacgagcaacctgcgcaaatattccattcttggcgcgttaaccttgtatctggacttcatcaacctgttcctgatgttgttgcggatcttcggcaaccgccgttaattctttttcaccatcactatcccggccatgtgtcgggatttttttcttactaaaaacgacacttaacaagtaccaggtataaaatatgccttatggacgagcggaagcgttttctgtatccataaatgcaaaagtattttgtatgcgtggttttaaatttattgatggtgaatattaatattttttctaaggataactaaaagaatggaaagttacagccaaaacagcaataaattagattttcagcacgaggccaggatattaaacggtatatggctcattaccgctttaggtttggtggcaaccgcaggactagcctggggagctaagtatatcgaaattacggcaaccaaatatgatagtccaccaatgtatgtcgccatagggttattattactttgtatgtatggcttaagtaaggatatcaacaagataaatgccgccatcgcgggcgtaatatatctgtttttactctctttggtggcgattgtcgttgcaagtttagttcctgtatatgccattatcatcgtgttcagcactgcgggcgcgatgtttttaatcagtatgctggccggtttattatttaatgttgatcctggttctcaccgttttatcattatgatgacgttgacagggttggccctggtaatcatcgtgaatgcggcattaatgagtgaacggcccatttggataataagttgcttaatgattgtgttatggagtggcattatcagccatggacgaaataagctccttgaattggcggggaaatgccatagtgaagagttgtggagtccggttcgttgcgcttttacaggtgcattaacactctattactattttatcggcttctttgggatacttgccgcgatagctataacgcttgtctggcaaaggcatacgcgtttttttcattaaccgtaaatgcacatactaaagaacttaactaaacttcacatcgccgcttcatttttcgcccgtagcttcttcgcctggctttccagcaacaggtaacagatcagcgccagcagcagtgggataaagtaatacagcacacggtaagcgagtagggcggcgataattgtacctttggaggtatgctccccagccagtagtgcgataaacaccgcttccagcacaccgatccccgccggaatatgcacgatgacgccagcaatactactaaccagtaacacgcccagtacaaagaaatagttcacgctttgaccaagtaacagccagataatcgcccccattaccatccagttaacgctggaaatcagcatctgagcgagggcgaatttccaactaggcagcaccagcttttgccctttgatggtcatatggcggtgcttcgcgaaagcgcaaaaccacaaataaaccgcgataatcatcagtaagccaatgccgagaatacgcagcgtagtttgatcgacataccagtgatccggcaactccaccacgcctgcggtaaagataatccctgccagtaaaatgtagcccagccagttggtggtaatactgaggctgaaaatccgcgtaatagtgctaccgggcaaccccagacgagagtacaaacgatagcgcataccaatgccgccgacccaggtactgagcgtcaggttgaaggcgtagcagataaagctcaccagcatcacctggcgcttcgccagtttgtgaccgcagtaaaagcgggcgagcaggtcatagcagccgtaaatcagatagctgacgaccaccagcccgaccgcactaagcagcgcaacgcgattgtagtcgcggatgaccttccagacctcttcccagtccacttttttggcgtagaccaccagcaacacaatcaccgcgataaaaaacagccaggtgaggatcttctttgctaagcgccagcgcgggtgacttttactcatcagggttttacccccgtgttttcagtttctacccgatcctgcgtttccattgtcggttgtgcgggcggatcaacctgcgccagacgtggcgtgtgtgccggaagccagccaaccagcgccgggaagtggcgtaaaaagtggaacgccagcacgcttttggtcaggttccaccaggtgcgtttgggcagcatggtttcatccacctgctgacaatctgcggcaataatgccgttcagattatcgcgcagcgtctggttaaaatgacgatcgtggatgatgacatttgcttcgagattcagactcaaactgagcggatcgagattactggaccctactgtcgcccagtgatcgtccatcaatgccactttgccgtggagcgggcggcggcggtactcaaaaacctgaacgccgcctttaaccagatagttatacagcaagcgcgcaccgactctgacaatcggcatatccggttcgccctgaatgatcagtttgatccgcaccccgcgccgtgccgctttacgcaaggcgtgtaaaaatcgatagccggggaagaagtaggcgttggcgataatcacttcccgccgcgcctgagtgagcattttcaaataatggcgttcaatatcatcgcgatgttcttcgttatcgcgccagaccagcaatacctgcgcttctcccggctggcggttctcttccgctttgtgatgacgtcgccaccagcgtcgtgccgcgctctgtccaggcaggttttccagctcaaactggagaatatcttcgacaatcggcccttcaaggcgtaccgcgtaatcctgtttagcctctggaccgtagctggacatatgctcggcggagtaattcagcccgccaataaaggctatacgcgcgtcgatcaccacaattttgcgatgcatccggcgaaacacattggtgcgcataccaaaaaggcgagggcggggatcgtagtagcggaacactacgccagctgccgtcagttcattgacaaactcatcgctgagatccgggctaccgtagccatccagcaagacttccgctttaaccccgcgttgcgctgctgccagtagtgccgcatgcagttgtttgccgacgtcatcctcaaaccagataaacgtttcaagaatgatgcgttcttgtgcctcgccaatcgccttaaacaccgcgggataatattgctcgccgttttccagcaactggatcttattgccttcgcgccagctacatttcataaatgaatctccgcacttaaaggggcatgatcagaaaggtgtcgccatgtccgcagcggcaacgcggttggcgcgctggcgctggcatttttgacgtagatcctgtccagtcgtagtagaggaaattgcaccggaaacgtgcgcgccgggcgtccgtgggcgcgggtaaaaatctcatccagtccggcctgcacttttaacggatgattagctttttgccgccagtcattgaaatcacccgccaccaataccggttcgccgtccggtagctcattcacccattcggcgagcatcgcaagctgcgcctgacggtgcgcctcacgcaggcccagatgtacgcacatcacatgaatcgcttttccggtcatcggcggcacaatgcggcagtagagcacgccgcgcttttccgcaccatcgacgctaacatcgcgattctcataatgttcaatgggataacggctcagtacggcgttgccgtgatgcccttccgggtatacggcattgcgaccgtaggcaaaatcgctccacatagtgtcggcgagaaactcgtagtggctggtatcgggccagttttccacatgcagcggatgaacttcgtgcgcgcccatcacttcctgcaggcaaacaatatcggcgctgacggtacgcacggcgtcgcgaagttccggcaaaatgaagcgtcggttaaacgcggtaaagcctttgtgaatattgatggtgagcaccttgaagctaaattgttgtgtttgatcgggcataattttcctgtctttgcctcttatctcattgaaatagtgtagtcggcgtcacaaaaaggtgcggtcttacggaattttccgtaaagttcggtactctgagtaagtagagataaattcttcaggagagaagccatgaagtggcaacaacgtgttcgtgtcgcaacgggtctaagttgctggcagattatgttgcatttactggtagtggcgctgctggtggtgggctggatgagtaagactctggttcacgtcggcgtgggattatgcgcactgtattgtgtcacggtagtgatgatgctggtgtttcagcgccaccccgagcaacgctggcgtgaggtggcagacgtgctggaagagctgaccacgacctggtattttggcgcagcgctgattgtgctgtggctgttgtcccgcgttctggaaaacaactttttgctggcaattgcagggctggcaatccttgccggcccggcggtagtgtctttgctggcgaaagataagaagttacatcaccttacgtctaaacatcgcgtacgccgctgattacatcaccttacgtctaaacatcgcgtacgccgcactccctgtcgtggccgttatcaccagtagcggccacaaactattccacacaatatccagactcgcatccttcaaataaatctgcttggtaatgtccgtaaagtggcgaatagggttaatccacgtcaggttttgcagccataccggcatgttttccaccggagaaacgtaaccggaaaggagaatggcgggcatcataaagacaaacacgccgataaacgcctgctgttgtgtactacagagactactaatcaacagaccgaatcccaccaggcttaaaccataaatcaccatcgtaaagtagaacagcgccaggcttccggcgaaggggatttgatacgcccagataccaatcgccagcacaatggtggcctggaaggtggcgacaattaacgccggtacggctttgccgatgaagatctgccaggtggtgagcgggctaaccagtagctgatcgagcgtaccttgttcacgttcgcgggcgacggaaagactagtgacgatcattacgccgatagtggtgatcatggcgatcagactcggcaccacaaaccatttgtagtcgagattcgggttataccagttgcgtaccaccagctcgctgttgttaggtttcggttttccttccagcagctcctgctgataatttttgacgatctgttgcaggtagttggcggcaatttgcgcactgttggagttacgcccgtcgaggatcaactgcaaaggcgcggtctggaaggtatccagtttgcggctgaagtcagccgggaaacgcaccagtagtaacgccttttgtgtgtcgatggttgggcggatctcctgtgggcttttcagcagcagcacatgagtaaaggcgctggcgcgggcaaaacgttgggtcagctccacgctatgctcgccgttatcttcatcgtagatggcgatggtggcgttagtcacttccagcgtggcggcgaacgggaacaggatcacctgaattagcacgggtaaaatcagaatcgcgcgggtttgcggttcgcgcagcaagctctgcaactctttgcggattaacgtccataagcgatgaaacatgctcttctccttaatccagccgacgtttggttttcagccacgtcaggccgataaacatcaccgcgctagcgatcaaaaacagcacgtttaccaccagcaccactggaatattcccggcgaggaacaggctttgcagggtgctgacgaaataacgagcgggaataatgtacgtcaccgcgcggatcaccgcgggcatactgtcgatctgaaaaataaagccggaaagcataatgctcggcagaaaagcggcgttcagggcgacctgagcggcattgaactggttgcgggtaatcgtggaaatcagcagccccatccccagggtactgagtaaaaacaggctggagataaaaaacagaatcagcaggctcccgcgatacggcacgccgagaataaacacactcaccagcatacacagcaacatcgccagcatcccgagaaagtaataagggatcagcttacacagcagcagttccgtgcgggtaatctccgtagagagcagagcctccatggtgccgcgttcccattctcgcgccaccaccaggctggtgagaatcgcgccgatgaccgtcatgataatggtcaccgcaccggggataatgaagtgctggctaatcgccgccgggttaaaccagtagcgggtttgtacatcaataagcggttcaaaagtctgcccgttgtcctccgctcgctgcatttgccagatctgccagatcccttcgacatacccctgtacaaagttagcggtattcggctcactgccgtcggtgatcacctgaatcggtgcggtggcgttggcgcgctccatctgttccgcaaaatccaccggaataaccaccagaccgcgaattttccccgcctgcattttggcgatcagttcctgacggttatcgctgatggtggcgtcgatgtaggggctaccggtcatggtgtgggtgaaatccagcgccgcttcgctacgctgttccagtaaaatcccgacccgcagcttgctggagtcgaggttaatgccgtaaccaaaaataaacagcagtagcagcgggatcactaccgcaatcagccagctactcggatcgcgaacgatctgccgcgtctctttaacgcacagcgcccgtacgcgacgccaggacaggatcgggttactcattgctatgctccttatcccagtcgtggatcaactgaataaaggcttgctccatggtgggatcgggttgctcatcgttagcgctctgtgctttcaaatcgtccggcgtgccgctggcgattaatttcccgcggtacaccaggccgatgcggtcgcaatattccgcttcatccataaagtgggtggtgaccatcaccgtgacgcctttctctaccatgctgttgatgtgcagccaaaattcacggcgggtgagggggtcaacgccggaagtcggttcgtcgagaaacagaatgtccggttcatgcatcaggctacaggccagcgccagccgctgtttaaaacctaatggcagttcatcggtggcgtgggaggcgatacttttcaggccgaacgcctcgctcatgcgggagattttttcgttctgcgcccgaccgcgtaagccatacacaccagagaaaaagcgtaaattctgttcgaccgtcaggttaccgtagaggctaaatttttgcgccatatagccgagatgctggcgcgctttaccggaactctctttcagatccatccccagcaccagcgcctggccggaagtcggcaccagcaaaccgcacatcatcttaaaggtggtgcttttacccgcgccgtttggccccagcaaaccaaaaatctccccacgtttaacggcaaagttgacgtgatcggtggcggcaaaatccccaaatttcttggtcagttctttcgcttcgatcaccgtctcgccgggtgtgccttctaccgtatgtaatattgcgcccagcgggctttcgctggttccggcaccgcccagcaaatcaataaacgcatcttcaaaacgcggcgtagtttcgttgatgttgatttccggcatcccgtcggcatggcgaatatcgtctggtgtggcctcttttttgaggatcagacgtacgcttttcccctgaatcatgccgtcgctgacctgcggcagtttcaaggcgcgttgcaacagtttgcggttgccctcgtgtggactggtcatcagaaagctgcgtccggccatggtttgtgtcagggcttttggttctccctgatacagcaactcgccttcgttcatcagtaacacgtcacggcactgctcggcttcgtcgagatagctggtactccagaggattaacatcccttcgcccgccagctcatgcaccatctgccacagttcgcgccgactgatagggtcaacgccgacgccgggttcatcgagcagcaacactttcggttcgcccaccagggtacaggccagaccgagtttttgtttcatcccaccggagagcttgcccgccaggcgtccggtaaacggcccaagagacgtaaactccagcaggcgagcaaaagtttgcttacgtgcctcgccggtgacgctgcgcaaatccgcgtacagattgaggttctccatcaccgtgagatcttcatacagaccaaatttctgcggcatataaccgagcacggcgtgcagcgcgccgtcgtttttgatcggatcaaagccaatcaccgtggcactgccgctgtcgggtttcagtaatcccgccaacatccgcatcagcgtggttttacctgcaccgtccggccccaccaaccccgtcacataaccggcgtgaatggtacaatcgagcggcgcgacggcgggcttgtccatgcccggaaagcgtttttccaggccgttcagcgtgataacggcatcattcatgtcctgcctcgtcaccgaattgtaccgtcactggcattccctggcgtaacgcatcatcggcgtcggtcaccacaatacgcaggcgatagacgaggtcggtacgcagatccggcgtttcgacggttttcggggtaaattcagcagtcgggctaacgaaaccaatctgcccgtgatacggcttgtccgggcgaccatcggtataaagcagcactttgcgccccggctgggcctggtcaagattacgttcatcaacataagcgcgcacccacaccggacgcgttagactaacggtaaacaccgtgccaccttcattgaggaccgtgcctggctccaccgcgcgcgttaacagcgtgccatcagacggggctatcaacgtactgtcctgtaaattcaactccgcctgcgccagttgcgcctgcgcctgttcgaggctggctttcgcctgagcgatgtcctgttcacggttaccggaacggtactgacgcaatttatcctgtgcacttttcagcgttgcctgcgcctggtcgcggctggagcgggcattttccaggtcatttgcgctaatagtgcggcttttccacaacccttgctggcggttatagaagttctgcgcatagtcataggcggcttgcgcctgtttcaccgctgcggcggcctgagcgatttcttcattgcgatacccggcaagcatcaggtcatactgcgcctgtgccacgctaacacccgctttcgcctgcatcagggcaatctcatacggcttgtgatccagttcgcccagcacctggcccgctttgatagcatcaccttcgtccaccgccaggctttcaacgcgccccccaacacggaaactaagatttaccgtacgaatatccacgttgccatacagcgtcaggccgttatcctggcggctttgataccaccagtagcctccggcaaccacggcggcaagtaccactaccgccaatccgatcacgacaggttttttcatcactacaaactcctttgcgataattacaaactcctttggcttaatccttgcaaaatcaggtcgatatgacaggtcaccgtctggttgatcagttcggtcttttcttcatcgaacgcggtccagccggtacgtaacagaattgtttctttgccaagacggaacgccagaatctcaccaatcaacgcatgggtatgaaggatcatgcgggtgtcattggcgtcgcagccggtccaggcggcaatcaggcgtgtcaggtggctgtgtagcggactaatcacctgttcgtgcaccaggtggtaggctgccgtgggagagagctgctcacgggagataaacttgctgaggttgacggtgtcatcctgggtgagcagcttaatcatgttcctgcaggcgcgaaggatcagttcacggatggcagcccgatcaggctgtggttgcgcgaacaagcgttcggcttcctcggcatgcggacggaactgctcgccaataaaatcggcaatccactgggcgcaggcgaggtacaaatcttctttgctaccgaagtagtaggtgatggcagcgatattctgcccggcctgggcggctatctcgcgagtggtggcgttcattccatattcaccaaactgcgccagtgcggcagcaatcagctgttttttcgcctgttcacccttgattgtcatggcaggattattcatcgcacagtccattcttaatcaaatgattgattaagattatgactccataggggagttgtccagtatggctaagaattttagcaacgccagtcacagggataatttatgcgctgcgtcacaaaaactgctacactccgctccctcatgacattgtggtttttgtcattttccttttcagtatctccctgaaaactacaccggtaacggtcggggcggttcggagtagttatgtctttcgattctttgggtttaagccctgatatcctgcgcgccgttgccgagcagggttaccgtgaacccacccctattcagcagcaggcgatccctgcggtgctggaaggccgcgacctgatggctagcgcccagaccggcaccggcaaaacagcgggctttacgctgccgctgttgcaacacctgatcactcgccagccgcacgccaaagggcgtcgtccggtacgtgcgctcattcttaccccgacccgtgaactggcggcgcagattggcgaaaacgtccgtgattacagcaaatacctgaacattcgtagcctggtggtgtttggtggtgtgagtattaacccgcagatgatgaaactgcgtggcggcgttgatgtgctggtggcaaccccgggacgtttgctggacctggaacatcagaatgcagtgaagctggatcaggttgaaatcctcgtcctcgatgaagctgaccgcatgctcgacatgggctttatccacgatatccgtcgcgtgttaacaaaactacctgcgaagcgccagaacctgttattctccgcgaccttctctgacgatattaaagccctggcggaaaaactgttgcacaacccgctggaaatcgaagtggcacgccgcaataccgcgtctgatcaggtgacccagcacgttcactttgtcgataagaaacgcaaacgcgaattgctgagccacatgattgggaaagggaactggcagcaggtgctggtgtttacccgtaccaaacacggcgctaaccatctggctgaacagctcaataaagatggcatccgtagtgcggcgatccacggcaataaaagccaaggtgcgcgtactcgtgcgctggctgattttaaaagcggcgatattcgtgtactggtggcaactgacatcgctgcgcgcggcctggatattgaagagctgccgcacgtcgtcaactatgaactgccaaacgtacctgaagattatgtccaccgtatcgggcgtaccggtcgtgcggctgctaccggtgaagcgttgagcctggtgtgtgttgatgaacacaaactgctgcgtgatatcgaaaaactgctgaaaaaagagatcccgcgcattgcgattccgggctatgagccggacccgagtatcaaagccgaaccgatccagaacggtcgccagcaacgtggcggcggcggtcgtgggcaaggtggtggtcgcggtcaacagcaaccacgccgtggggaaggtggcgcaaaatctgcaagcgcgaaacctgcagaaaaaccgtctcgccgcctcggcgatgccaaaccggcaggcgaacaacaacgtcgccgccgtccgcgtaaacctgccgctgcgcagtaatcttttatgccgggctatgcccggcatcaggctgatgaacaaacgcaaaactgcctgatgcgctacgcttatcaggcctacgtgaactctgcaatatattgaatttgcatgcttttgtaggccggataaggcgtttacgccgcatccggcatttcacaacaagcacttgtcagcaatttgagaacacgggaaaaaatttatctgttttaccgcccataagccaccgagacgttacttctctatagccaattgttcgcgcaactccattaaaaggtagcccagtcgattcttgcccttaccatgaccaccgtctccccagtaagcatcgttttccgtatgctcaaccagttttgcgggcgcggttgccagcaagagcgcacgcagttctgcatgctgttcgaatttagcgcgaagtgcttttcgcatcacctgttctttgacgctctcccagtttttacgcagaggcttagaacgatcgcgccccatgcgtgcggcgaccataggggaagaaacccgacggatctcttcgcggtatttttcatcaaggaatttttgtgcctgaaaatagtgttcactggtaggccaggttttcccgtcaaccttgatgggccaggcggcaaagttagaaaaatcaccgtagtcatcgctggtgctgtagaaatttatgatggtgtcttgcatgacgtgttggatcctttgtgctcgaacgggcattaaaccgcattatgttggtggttattgcgagccgctttccagaaacagaaaaaccattacccctgaaaaccgaaaaatgccacaatattggctgtttatacagtatttcaggttttctcatggcattaaccgccgcgcttaaagcgcaaattgccgcctggtataaggcgcttcaggaacagatccccgactttattccccgtgcgccgcagcggcagatgattgcggacgtcgccaaaacgctggccggagaagaagggcgacatctggcgattgaagcccccaccggcgttgggaaaacgctctcttatttgattcccggcatcgccattgcccgcgaagagcaaaaaacgctggtggtgagtaccgccaacgtggcattgcaggatcagatttacagcaaagatttaccgctgctgaaaaagatcattcccgatcttaaattcactgccgcttttgggcgtgggcgctacgtttgtccgcgtaatctgacggcgctcgccagtactgaacccacgcaacaggatctgctggcgtttcttgacgacgaactgacgccgaacaatcaggaagagcaaaaacgttgtgcgaagctgaagggcgatctcgatacttataaatgggatggtctgcgcgatcatactgatatcgctatagatgacgatctctggcgtcgtttaagtaccgacaaagccagctgcctcaaccgcaattgttactactatcgtgaatgcccgttttttgtcgctcgtcgggagattcaggaagcggaagtggtggtggcaaaccatgcgctggtgatggcggcgatggaaagcgaagcggtattgcctgacccgaaaaatttactgctggtgctggacgaaggccatcacctgccggatgtggcgcgggatgcgcttgagatgagcgccgaaatcaccgcgccgtggtatcggctacagctggacttgttcacgaaactggtcgctacctgcatggagcagtttcgcccgaagaccatcccaccgctggcgatccctgaacgtttgaatgcgcattgtgaagagttgtatgagcttatcgccagcttaaacaacattctcaatctctacatgcctgccgggcaggaggcagagcaccgttttgcgatgggcgaactgccagatgaagtgctggagatctgccagcggctggcaaaactcaccgagatgctgcgtggcctggcggagttatttcttaacgatttaagtgagaaaaccggcagccatgacattgtacgtctgcatcggttgattttgcagatgaaccgcgcgttggggatgttcgaggcgcaaagcaaactctggcggctggctagcctggcgcaatcttccggtgcaccggtgaccaaatgggcgacgcgggaagagcgcgaagggcagctacacctctggtttcactgcgtgggaatacgtgtcagcgatcagctggaaaggctgctgtggcgcagtattccgcacattattgtcacctccgcaaccttgcgtagcctgaacagttttagccgtttgcaggagatgagtggtctgaaagagaaagcgggcgaccgttttgtggcgctggattccccctttaaccactgcgaacagggcaaaattgttattccccggatgcgcgttgagccttccatcgacaacgaagagcagcatattgccgaaatggcggcctttttccgtaagcaggtggagagcaaaaaacatctcggtatgttggtactgtttgccagcggacgggcgatgcagcgctttctcgactatgtgacggatttacgtctgatgttgctggttcagggcgatcagccgcgttaccgtttagttgaactgcaccgcaaacgcgtcgccaacggtgagcgcagcgtgctggtgggcttacagagttttgccgaagggcttgatttgaaaggtgatctgctcagccaggtgcatatccacaaaatcgcttttccgcccatcgacagcccggtggtgatcaccgaaggggaatggctgaaaagcctcaaccgctatccgtttgaggtgcaaagcctgccgagcgccagctttaacctgattcagcaggttgggcgactgattcgaagccacggttgctggggcgaagtggttatctacgacaaacgcttgctgaccaaaaattatggcaagcgactactggatgcattaccggtatttccgatagagcaaccggaagtccctgaaggtatagttaaaaagaaagaaaaaacgaaatccccacgccgtcggcggcgttaatgatgtgagtcaggtaaggagtcgtaaatggactatcgcaaaatcattaaagagatcgggcgcgggaaaaaccacgcgcgcgatttagaccgggatactgcgcgcggtctgtatgctcatatgctcaatggtgaagtccctgaccttgagttgggcggcgtattgattgcgctgcgtatcaaaggagaaggggaagcagagatgctcggcttttacgaagccatgcaaaatcacaccatcaagctgacgccgccagcaggcaagccgatgccgattgtcatccccagttacaacggcgcgcgtaaacaggccaacctgacgccgttgttggcgattctcctgcacaaactcggttttcctgtggtggttcacggggttagcgaagatccaacccgcgtgctgactgaaaccatttttgaattgatgggtattacgccaacgttgcacggcgggcaggcgcaggcgaagctcgacgaacatcaaccggtgtttatgccagtcggcgcgttttgcccgccgctggaaaaacaactggcgatgcgctggcggatgggcgtgcgtaacagtgcacataccctggcgaaactggcgacgccatttgccgaaggtgaggcgctgcgtctttccagcgttagccatccggaatacattggacgcgtcgcgaagttctttagcgatatcggcgggcgggcgctactaatgcatggtactgaaggtgaagtgtatgctaatccgcagcgctgcccgcagatcaatctcattgaccgtgaagggatgcgggtgctgtatgaaaaacaggacactgctggtagcgagttactgccacaagcaaaagatccggaaaccacggcgcagtggattgagcgttgccttgctggcagcgaaccgattcccgaaagcctgaaaatccagatggcttgctgcctggtggctacgggtgaagcggcaactatcagcgacggcctggcgcgcgttaatcaggcattttaattcttttctcagccggatgagccatgtcatccggcttttaccccaccgcaatatgaaattcctgcatctttattgaccttcccacgcccggcgtgcagcataaaaatacaacaaacacataacataaacaggagttaaccatggaaagtggtcatcgctttgatgctcagacgctgcacagttttattcaggctgtatttcgtcagatgggtagcgaggaacaagaagcgaaattagttgccgatcatttaatcgcggcaaacctggcagggcatgatagtcatggtattggcatgatcccaagctatgtacgctcctggagtcaggggcacctgcaaattaaccatcatgccaaaaccgttaaagaggcgggggcggcggtcacgctcgatggcgatcgcgcatttggtcaggtcgcggcacatgaagcgatggcgctggggattgagaaagcgcatcagcacggtattgccgccgtggcgctacataacagccatcatatcggccgtatcggttactgggcggagcagtgtgcagcggcggggtttgtctctatccactttgttagcgtggtcggtattccaatggtcgcgccgttccacggtcgcgacagccgctttggcaccaatccgttctgtgtggttttccctcgtaaagataatttcccgctgttgcttgattacgccaccagcgccattgcatttggcaaaacccgcgtcgcctggcataaaggcgtccccgtgccgccaggttgcctgattgacgttaacggcgtgccgacgaccaatccggcggtaatgcaggagagcccgttgggtagcctgttgacctttgccgaacataaaggctacgcccttgcagcgatgtgtgaaattcttggcggggcgctttccggcggtaaaacgacgcatcaggaaacgttacaaaccagtcccgatgccattcttaactgcatgaccactatcatcatcaacccggaactcttcggcgcgccggattgtaacgcgcagaccgaagcctttgccgagtgggtgaaagccagcccgcatgatgatgataagccgattttgctaccgggcgagtgggaagtgaacacgcgtcgcgaacggcagaagcaggggattccactggatgcgggaagctggcaggccatttgtgatgcagcgcggcagattggtatgccggaagagacgttgcaggctttctgtcagcagttagccagctaaaaaaaaagcccgtccagtggcggacgggcaaacaagggtaacataggatcaatgagggttagagcatatgcgtctgtcggcaaacagacagggaaatacttgtgctggacgtagcgtaaacgcctgatccgtccaacggttcggattttgtaggcctgataagacgcggtagcgtcgcatcaggcatctgttgccggatgcggcgtaaacgccttatccgtcctacgaattacttataaattaccgcagtaccgcttaatttattgttgttggtggcggaagtgatgctgtatccactggcaccggctgccgcggctttctcagccagtttcgcttccagggcatcgagggtggatgcgccatcggcagaaaccacgccgattttattcatgttctgtgcctgggatgccgttaccggttccgccgcgaacacgccaaaactcagagtactaagagccatagcagcaacaacagtattgatagttttcataattaatctctcgcaggtgatttttgtataagtgacgttgtttcgtcgatgtgatgagtatcacgtttttttacgagagataaaatcgaagagaattgaccgccttgttcaaataaattgattgatatctaacctactgataaaccatttatttgttgtacttatgaacttgttttataccgcgtggcagtcacagcagcgttaaaggcacggaatgacacgcaaaatacaaattatactcgctatgcatctcgccagttgtagttaacgtaactggctgtctttgctacctctgcgattatatcctgtataagctggtttttgtaaatctttctcctgctgacaatgaatacataagcgcacgccaggaatggcttcccgacgggcctgcgggatgggggcaccgcactcttcacattcatccaggctttcgccgcgcggaatttcaccccgagcgcgggcaatcgcatcttcaattgtactgttgatctgttcgttgacggcgtcatcgttagcccaaccggatgccatatcgacctccccatatcaatacttgtacagttaagtgtagctaatccagggacgaactcgggcagttcaagcatcagatctcgctccattcccgcagcagattatgataaagattaagcaggctcaggatctcttcactttcgccgtagcggcttttcaggctctgaatattgttgtccagttcaaacagcatggcgcgctttttatcatcgcggatcatgctctggatccacataaaacttgccactcgtacgccgcgggttacgggtgtcacgcaatgcaggctgctggagggatacaacacgagatcgcctgccgggagttttacccgatgttgtccgaaggtgtcattaacgaccagttcgccgccgtcgtagctttgtggatcgcttaaaaacagcgtggcagaaaggtcagtacgcatccagccgttttgtggatggctgcgtactgcgccatccacatggaaaccataggtttcattgttctgatagcgattaaacagcggcgtggaaagggtacgcggcaaggccgcggcaaagaataaagcatgttggttaaccgcgttcagcacctcattttgcagggcggcgtataacgtgctgcgggtgtcgacctgttgattgttcttaacttgcgcaccttgtgcgccggtggtgacgcgtccatccacccattcggcttgttccagttgttcgcgaaaacgagcgacgtcctgtgggcttaacacgccgggaatgtggtacatcatacaatttctccaaaaagtggggcctgcgccccacatctgaatcagaaatgcatattggctgtgagcaagaaggttcttggctcgcccgggtgataacggtagccgctcttgttgatactggcgacgtaatcggtatcaaacaggttgtaaacgtttagctggaagtcgagattgcgattaactcgataccccagtttggcatcggcgacccagtaaccttcggtaaacgctggcgttcccaccgcgccgtcactacctttatgcatactgccgatatagcgtgcgcccgcgccaacagagatatcgtcggttgcctgatattggctccataaggtgaaggcgtgctccggggtatacggcaggctactggaaccatcctgggcaacatctttgccgtttttgatggttgctttttgctgggtatagccgccaatcacctgccacgcgggagtgatattcccggccacggatatctcatagccttcgacgcgtttcttaccgtattggctgtaagttccgtcatcattttgctcaacttcattttcgatatcagtgcggaacagcgcggcggtgagcaacagacgtttatccagaacctgccatttggtgccaatctcgctggtgttggctttttgcggtttaaaatcggtgcggttggcactgttaccgctgccagactgcgcaagggcgaagttgttgccgcccggaggctgctgggaaacggcatagttaatatagacattgccgttttccgtcaggtgatacagcgccccggctttccagttcatcagattgccgctcttggcggtgtcgacggtggtgaccggagaaccttttgccacaccagttgggcaggtgatggcaccgcgtccgctgccgccgcaggcggtggcactgtcatattcagtatgataattatccagacggatcccgccgttcagctcaaaatcacgggtgatttgcagcgtatcaaaggcgtaaattgcgaaggtatccgtctgaccattggcgtttgcgccgttgcgcgtcaggccgccgggatgaatgctgctgtcaggatgataaatatttaccgcgggtaacgtcaccggattaacgccgtagttagtctgcgtttcacgggtaaattccacgccggtactgacatcatgaccgatagaaccggtatagaacgtgctggtcaggttggtctggttggtgagaattttattactcacatctttggtattcgccgtgcgactccaggtccagctattcacatcgctggtgggctgagtaatattgctcgccccgcccataatcgccgtcatcaggtaatcctgctttacgcggctccaacgggtagtattgcgaatggtggtgttatcgttgatgtcgtgctcaaaacgcatggtggcggtgtcggtggtgctatcgtcgtaatcggaatccgtgccgtaaaagttatgagtatcaacttttccggaatgattcagggccgccgttcccgcagatggggcagaatagcccggcaaaccgatggtcggaatgccgccgtctggcgtgttgtgctgggtgacatgcagataattaagatacaaacgattcgctgtaccaaggccaaaagcgacagaaggggcgacgccgtaacgctcatttttgactttgtcgcgtccggcatcgtgcgttttttcgcccattacattcaggcgcaccgcggtggtatcaccaatgacctgattgacgtccagcgtgccgcggcggaaccaggcgctgccaatactggcggaggcgtcaatgccggaatcattgcgcggctgcttgctgatcatattgatgctgcctgtcggtgcgctgcgcccgtagtcggtgccggacggccctttaatcacttcgacctgctcggtattgaaggtgtcgcggctgacgctgccgatatcgcgaatgccatcaatataaatactgttagaggtatcggcaccacgcatataaatggcgtcgccagtggtggagttaccgttctcacccgcaaaaaacgcacccacgccggggacgtttttgagcgcgtcggtaaggttggttgcgccctgatctttaatcacttgttcagaaattaccgtcatcgtgcgggtagtatccgctaccggacggctgaatttcggatcggcagattgttgtggcgcataaaggctaggcgtacttgcttcgacaaccagcgtgtcatccgcgttagtttgcccttcggcggcgagtgcctgagccacaggcgtgatgccaatacaaagaccggcaaagaacgtgaggctatgaaattgtctggcagggaaattgcgattgttttccattttgcaggtgactttttcttatatgttgaaattttcactgccacgagaaagcctctctgcggatgcgatgccactgttaatcccgtgatagtgctcgtgaaagtgataataattttgataagcattatcacttggagcgattttctatcacccattgcgcgaaaaagaaatacatttatttacattgagttcatatttgatgttttttgattacaaaacagacgaaaactgcatccagaggcgaatgcagttacgttggtggggttatttgtagatggttgcagtaccgaacatctggtcatttccgcctgcggaattaatgacataacctttcgcgccttgttcgcgcgctttttctgccagtttatcctccagatcgcttaggttacttgcgccagttgcgctaacggtaccggcgggccgtagctgaccgctgtccaggttactcatcggttgcgcggcataagccgtgagagagattccgctcaggacggtggcaatcagtagtgtgaggcactttttcataatgacatcctcataaatacaacgggtagtgcctgataagtgtaggtcgcctgcgcgatgcaaatgacgcaaaaaattgacagagatgtgcttattttttgaacgatatatttttacaaaataagacaaatcaatgacatgcataatgctgatttttatgatgaattgccataaaccatagccatgttaaggttttggggaatgataaacgcagccagatatttaccctgtcgcgttatgcgggtatcttacgccgctgcttaaaggagaatgctatgtccgcccagaaaccggggttgcatccgcgcaaccgtcatcacagccgctacgatctcgccacgctttgtcaggtcaatcctgaactcaggcaattcctcacgcttacacccgccggggagcaaagcgtagactttgccaatccgctggcggtgaaggcgctcaataaggcgttgctggcccatttttacgccgtagcgaactgggatatccccgacggttttctctgcccaccagtaccgggccgggcggattatattcatcaccttgccgatttactggcagaagcaagcggaacaattccagcgaatgccagcattctggatatcggcgttggtgcgaactgtatttatccgctgattggcgtacatgaatatggctggcgttttaccggtagtgaaaccagcagccaggcgttaagcagtgcgcaggcgattatcagttctaatccggggcttaaccgcgccattcgtctgcgtcggcaaaaagagagtggggcgatttttaacggcatcatccataaaaacgagcaatacgacgcgaccttgtgtaacccgccattccacgattccgccgctgcggcacgggcaggtagtgagcgtaaacgccgtaacctggggctgaacaaagacgatgcactgaactttggcggccagcaacaggagttgtggtgtgaaggcggtgaagtcacctttatcaaaaagatgattgaagagagcaaaggcttcgcgaagcaggtgatgtggtttacaagtctggtatctcgtggtgaaaacttaccgccgttgtatcgtgccctgacggacgtgggcgcggtgaaggtggttaaaaaagagatggcccaggggcaaaagcagagtcgctttattgcctggacctttatgaacgacgagcagcgccgccgttttgtcaatcgccagcgttaaagcgttggttcccccggcggtaacggttcagccggggtcgcgcccggagcaggcagcacctgataagtctgcactggcgcgcgaacgcccgccaggtcgaaatgttttttcacctggctgtcgagggcaaagcgtaccgtccactgtttgagtggcagcgtggtgaagctaacacgcagtgtaaacgcggtattgcttaagccgacaatcccggcaaaattcggttcaccaataatcagcccgcgaatttcttcgttttccattaattccgctaccgcatctttcagtgcctgattggctttatcagcatcttcatggcgatcaacatcataatttgccaccacgctaccaatgccgcggacaaagttagcaaaggtggttatgctagaccacggaatgatgtgatacgccccggtatcctgtcgtacgcccacggagcgaatgctcatccgttccactgtgccggtcaacggcccgatagtcaccaaatctccagtgttcatgccgttttcaaactgaataaataccccggtgataatatctttcaccagcgtttggctaccaaagctgatagccagacctaatgccccggcacctgccagcaatggcgcgatattgacgccgatttcgctcaacacaatcatgatggtgatggtactgataatcaccgccagcgcgttacgaaacagcgtaagcagggtacgcgtgcgggcgctgggtagcgggcggccatgaatatcgctagccagccggttttcgatcaaactggcgagcaccgtccagccaaccgcgctgaagaaaagaatgagtgcgatacggatcaggatatctacggttttctgccccgcgccgttttgcagccagttccagaaatcgaacaatccccatgcgctcaacagcaacattaccgccacgcagactgtcagaatacgcgccgttttcagcgccgcgctcagccagccattcaaccgtttttgcagctccggatagttacgctgagtatgtgggctgagagtgatggttttcgccagccagcgggaaaacataccggaaacaaacgctgcgataccaataatcgccaggctgcgcaccgttgcacccatcataaatttcaggctgttgcccggatcgaacaagctaaagaaaaacagcacgataaaataggcgcttgccagccagtgccacaccagcgcaaaggcgcggataaacaggctgaaaaaggccaggctatgctccgcgaagttgagcaaatgctgggtaatctcttttttattacgaaagatcaggtacaacgcccagacggtcatgcacagcataatgatgacgttcgccagcgcacctatctgtacattcacctgattagagataatcggcacggccacaatcaggccataacctatcaaactgcttaaccagctcaggcgacgactccagtaacgggcgctctcgtcctgaatcgtgaacgggcgcagctccgccacgtttgggcaaaaaatcaggcgtagtacggctttgaaaaattcaatgagggcaaaggcgttgagaaacaaactttgttggaaagcgatggtgcgactgcctgcattcaggttgtcgcttaatacctggccgacaaataatgtcagggccagtaacagcaggtcgataataaacgccccgataatcatcgccggaagctgcaaccagttactgcgctcacgatttttttgccgcgcccactgacccattttgcgatacagcggcagtgcgcacaggcgaatcagccagtaaaaaccaaacactaataccgctaacatactaaaatgggtcagcgcattgctgaaggtttgtggattaaacggcttatgcggggagccggtgatattgcgataaagttgcccgaagcgggcggaaagggcttcaccataatggcggctgacttcggtgaccttttgcagcacggtttgctcttcgaccagcgtcggcggcactatttttggtaccggttcagcagggggcgtagcggcaacggtgcgcaactggtcgatcaactctttacggctggtgtcattatccagcacatccgccagtgcgccataggccgcttttttttgttcgatatccggttccggggccggttcagtcgtactgtccgttgtcgttgtggttgtaacgccgggtatggataccgcgtgggcaggtgcgcccagcaggcagaagaggatgaacaggatccaccgcatgactcctccagtgagaaaatagagcaaaaagataagtatagatgctggaggaggggcgattttaaatgagaggaatctggtgtgcctccctttcgggtgaaagggaggaagggatattaagcaggttgctgacaacgtgcgggcttttttgccggatgcggcgtgaacgccttatccgtcctacaagttcatgcaattttaataagttgccagatatcctgtaggcctgataagcgtagcgcatcaggcaatgtgtcttattaagagacgtgctgcaaaaattcctgcaagcgctggctcggcgggttcttgatcaacacctgcggattgccatcttccgcaatccggcctttgtcgataaagatcagccggctagctactttctcggcaaaaccgatttcgtgggtcacgatcaccatcgtcatcccttcttcagccagatcctgcataaccttcagcacttcatggcgcagttccgggtcaagagcggaagtcggttcatcaaacagcatcattttcggcttcaccgccagcgcgcgggcaatcgccacacgctgctgttgaccaccagaaagttcggaagggtagtgatgtgcacgttctgccagaccgactttcgccagcagctcacgtgccagtttttccgcctcttctttgttcgcgccacgcacgcgtagcgggccaaacatgacgttttccagcgctgtcagatgcgggaagaggtaaaactgctggaacaccatacctgcttcctggcgaatcaggcgctcgtcaactttcggatcgttaaccttcaggccatcgacaatcagatcgccggaggtgatttcttccagtttgttgatgcagcgcagcagggtgcttttaccggaaccggacggcccgataatcaccacgacttcgccctgggcaatgttcaaatcgatattgtgcagcacctgggttgggccaaagtgcttggagacgtttttaaattcaatcacaggattttcatccttctttccagacgacgcagaataaagctcagcaccagggtaataatcagatagaacaccgccacggcgctccagatctcaagggcgcggaagttaccggcaataatttcttgcccctgacgggtcagttccgccacgccgatcacaataaacaggctggtgtctttaatgctgatgatccactggttacccagcggcggcagcatacgacgcagtgccagcggtaaaatgacgtagcgaatggtttcccaacgactaagaccgagcgccagtcctgcttcacgaaaacctttgtggatagacagcaccgcaccacgcgtgatttccgcaatatacgcgccggagttgatcatgatggtgaccaccgccgcagtaaatgggtcgatgcgtaagtcgttaaacgccatcggcagggcgaaataaataaacatcacctggacgacgataggtgtgccgcggatcacttcaataaagaccagcgcgacgtggttggctatccaacctccgaaggtgcgtgcaaaacctgccagcaatccgattaccagaccgcctgccagaccgaggacgctaatccacagggtcattttggcaccttcaatcagaagcggaatggcaggccagatggcactccagtcaaactgcatatgttgttcctgttaccgtggtgtaaataatcaaattcagggtaattaatggccccggagcgggtttgcgcccctcaccctaatcctctccccataggggagagggaactgccagtgcgttttacaggtgtagcgttattatttcggttcagtaccgaaccattttttgtagatttcgttgtaagttccgttctcgcgcagggttttcaacgcgccgttgactttgtcacgcagctcgtcgctacctttcgggaacgcaataccgtattgctgcgcttccagagagtcacctaccgctttgaactgaccgttaccggcggttttgatgaagtacagaatgtttggcgtatcgtgcagaacggcgtctgcgcggttggtgcccagttccatataggcgttatcgatgttcgggaactgacgcagatctttagttttgatgtttgctttcgcgtaatcaacggagccagtaccgctcttcacagcaaccactttcccgtcgagatctttcacgcttttcacatcgttattgttagctttcaccatcactaacaggccgcttttgtagtagccgtcagagaaatcgatcgcttttttacgctcgtcggtgatggtaatgcccgccagcgccagatcgacgtttttggtttgcagtgccggaatgatcccactgaaatccatcggcttcagttcgtaatccagcttcagctctttagcgatggcagcccacagatcaacgtcaaagcccacatatttatcgccctgtttaaattcaaacggaacgaaggcggtatccgtcgcgacaactaattttttatccgcggcatgagaagaaaccgcaaaagccagggtcagtgcagccagactaacttttaatacagacttcatagcatttccttttttctatccacgggacgatcccctgcgtgacattcacatatatgaaaaaatcgtgccagttttgcaactccttgatttttcgagatgcggcaaaaacgtgatgcacgatttatagggcaataccctgaagatgcaccattctggggcaccaatctggtgcgctaaaattgtgcactcaacacagtgattatttagcgtaaaacctgatgaaaaaacaatctttatgtaacgattgtgtgatgatgtggatacaaaaaatttacttaatcagctggagatagcagatggatgcactaaataagtgcgttgaggtgggctgcaaaacaaaacggcctcctgtcaggaagccgcttttatcgggtactaaagttctgcaccatcagcgatggatttattcgatgttagactcgataaaccacaggaatttatccaggtcgcgagacgcggcggtcaggatatctgcggtgtcgtcatctttcgcttcgccaatcgctttgcgtacgtcattagcgacgattgcgtaacggtcagccagttctttcaggtgatcctgaacgttgtggatgtccagcgggtaacttttcagcggggttttgctgttgataacttgagtggtccccagagctacaccgcccagctgcactgcacgttctgccatggtatccagatgatcgatcagtgcggtgcggaagccatccagcatttcatgtacggcaatgaagttagcgccgcgcatgttccagtgcgcttgtttggtaatcaaagaaagatcaataaactggataacctggcgattcagcaactctactgttgcttttttctcgctgtcggagacatcgttgcgggtataaagcagattggtcgctttacttttaactaatttagcggtactcataatttcatatcctcttgatgttatgtcccagtaattaacgagattaagtatagcaccggctatgtgttccgctattctggctgttcctatcacactaatagtggtaacaagcgtgaaaaacaaaactaataaagattcaatgagttagatatattgataagaacaattcttatttatctgctcgccaggaattttcggaataaatatgcttttgcataattcgatatataaagacggtgtagaggaaaagtagcgagaaattctgcatggttatgcataaccatgcagaaatgtaaatttaattaatgtctaattcttttattttgctctctttgcgtactgtcagcgtagaccccatactagcggcgatgatagcgccgagcgccagtagctgtatgggtgtcagtgtttctccgaggaaaatcatcccggaaacggcagccagcgccggttccatgctcatcagcgtaccaaatgtccgtgttggcaaacgggtgagggcaatcatttccaggctataaggcagagcggtgctgagaatagcgacagccagacccaatggaataacgctccagtgccagagtgcttcaccagcctgaagcgctccaattggcacgaaaattaacgctgcaatcaagctaccaattgccaccgtcgcagggccatgttccgctcctgcgcgttgcccacttaaaatgtaaatagcccaacaagccccggcccccagtgccagcgcacagccggttaaatcgacatgggaaacgtcttgccccagcggtagcaggaaccacagaccaagaaccgccagcacaacccagacgaaatctaccgggcgacgagaagagaacagcgccaccgccagtggtccggtgaactccagcgccaccgcaatacccagcggtactgtctgaatagaaagataaaaaagataattcatcccacccaggctaacgccgtaaaacaacagcggtaaccgttgctctttggcaaagcgcagtcgccatggcttaaagaacgcgatgaggatcagcgttcctaatgccagacgcagcgcagtgacacccggtgcgcccaccagaggaaaaagactcttagctaagctggctccaccctgaatagacgccatggcaacgagcaatatgactattggtaaccagaccggcattttacgtaaactaccaggcatcctttctcccacaaatatctagacttaagtaaagcgtggagtgtactggatatacccaatgctggttgagcatttgttgaaaaaattttcccccgttttgactaaaatgcgccaggattgatggaatcattagtctggtgattaggaataatctggatgaatgacagggaaaacatgcgtaatacttacgcagttctctgaaaaagtgatttaaatttagatggatagcggtgtatggaaacgttctgttacatgaaatggcccgttagacatcacaaatcgcgaagagtttcccattaatttttgatatatttaaaacttaggacttatttgaatcacatttgaggtggttatgaaaaaaattgcatgtcttagtgcactggccgcagttctggctttcaccgcaggtacttccgtagctgcgacttctactgtaactggcggttacgcacagagcgacgctcagggccaaatgaacaaaatgggcggtttcaacctgaaataccgctatgaagaagacaacagcccgctgggtgtgatcggttctttcacttacaccgagaaaagccgtactgcaagctctggtgactacaacaaaaaccagtactacggcatcactgctggtccggcttaccgcattaacgactgggcaagcatctacggtgtagtgggtgtgggttatggtaaattccagaccactgaatacccgacctacaaacacgacaccagcgactacggtttctcctacggtgcgggtctgcagttcaacccgatggaaaacgttgctctggacttctcttacgagcagagccgtattcgtagcgttgacgtaggcacctggattgccggtgttggttaccgcttctaatcactttggtgatataaaaaatccgcctctcggggcggatttttgtttttaaggtttcgggtcgaaaatatcggttccgagatggttgtaatccaccttctgtaactggaagttggtgatgtatatcggcccggctttcttctcagatataaacgggtatttgatgttaatttccttcgctttaatccccgtccactgggagaaaaagcctaagaagtcattggcactgcggcgggctttaatcacacgatgcgctttatcgtcgctggaaatgaccataaaaggcacctggaaattttgctgatatttatcatcatgggcaaggtattgcacgtctttaccgcgctctttaaaggccagaccgtggtcagaaaagtaaaccaggctgaagctgctgccgctgttgcgtaactgatcgtacagcttgcgcagtaaatcgtccgtttgcgtcatggtatagagatagcagctcgtttctttgctttgcacaaaggtttcgtattttccttgtgtcctgtcgcaggcctgcggatgactgcccatcagatgtagaacaatcagctgcggttggctgtgctcttgcgccagcacttgagcggtcatatccagtaacgcttcgtctttggtgtttttatctgcttcaaaattaccttctttcaggaagtacacttcatctgctcgtttggcgatgctggcgatagcggtatcgtattcgccgatttgaccctggttggaaaaccaccaggtctggaagcccgcgcgatttgccagggtgacaaagttatcctgaaactgtggtttgccatcgacaacgcgattgagcgttaagccaaggcttttctgcgtggagccactggcggcaatgtagtcagcaaatatcaaaccgttaacgctgctggcaaacggggtattgtcccagtgaccgccaaaggcaccgagggcatcgcgacgcgcgctttcaccgatcaccaccacataggtctgatacttcggcttaacggcagtgaccgtccaggtatctttcattccggaaagttttgccatccgttcttgctcttcaatcacctcgttattattgacgatgacatccttagcaaaacgaaataccggatagccagtatctttcagtttaaatacgccaccccaggccaggttttgcacgggagcaacaaaaaatgtcgccacactgaataccagacacaggctgtcgaaggtattccagcgcgctttttcattctctttttttcgcctgattgctattacgccgagcgcaaaaataaataagccgaccaggtagctgtaccacggaaaaatcgtcaggatttcggtgctctcttccatattggtggagtgcaatgccagcaatgtattgaaattaggcgcgccgtaggcctgagcaaaagggaaataacaagccgccaccaggctactgacaccgaccagaactttttgtacgcgaggcaatgttcgccatagcaaaagcaaaatagccgtaaacgcagcggtgtagagcaaactgaaggggtaacctaagccgaggttaattaataggctctgtaaaaagtagaacgcagtccacgggctaaatacccggctacgggtaacaaggctttctttgagggttaaattcatatgccactatcgtaacaaacgccatgtgcttaccctggcgtcaagggtcaatacctgcaagagtgcgtgaagagtggaaaggggtccgcatccgcgagccgcaatatacgcagggctgcaagaagatagagcgagccgccgtagtggtcaactactgacgaacaaatcttttgcgaaggggattgcaaatccgacaaaaagtggggtttttcagaccaaaacgcgttatgcctgcatgaaagcaggagtgaagcggcgtaccgcgacgccgctatttatcggaaggtttatcttgctgcggtttgttgttgaccatatcgcacaacatagagagcagcattaaccgtactttaaagggagaatgactaaacacgcgcatacacctcttgaactcattcataagacctcctgacttgctaatcccgtcgatccttgaggggtgattgcattacatacagatatagcacaggctatattatatagctattgctaaaacgttaattttttgtaccttcgcaactctggtttacaatgtgcgcacgaaatgagaacgctatgtatgcgtcaccataatgaggaagcacaatgagtcgtcgcgcaggtacgccaacagcaaaaaaagtgacgcagttagtgaacgtggaagagcacgttgaagggttccgccaggtcagagaggcgcatcggcgcgagcttattgatgattacgttgagctgatttctgacttgatcagggaagtgggggaagctcgtcaggtggacatggctgctcgtctgggagttagccaaccgacggtggctaaaatgcttaagcggctggcaaccatggggctgattgaaatgatcccctggcgtggcgtgtttttaacggcagaaggagagaagctggcgcaggaaagccgcgagcgacatcagatagtcgaaaatttcttgttggtgttgggcgtcagtccggaaatcgcccgtcgcgacgcggaaggcatggagcaccatgttagtgaagagacgctcgacgcttttcgtttgtttacccagaaacacggtgccaaatgagcctgccttttttacgcacgctgcaaggcgatcgtttttttcagttattaattcttgttggtatcggattaagctttttcgtgccctttgcaccgaaatcctggcctgctgctatcgactggcacaccatcatcaccttaagcggcctgatgctgctgaccaaaggtgtggagttaagcggttattttgatgtgctggggcgcaaaatggtgcgccgctttgctacggagcgtcggctggcgatgtttatggtgctggcggcggcgctgctttctacctttctgaccaacgatgtcgcgctgtttattgttgttccgctgactatcacgctaaaaagactgtgtgagatcccggttaatcggctgattatttttgaggcgctggcagtcaacgctggtagcctactgacgccaattggcaacccgcaaaatattcttatctggggacgttctggtcttagctttgccggatttattgcccaaatggcaccgctggctggcgcaatgatgctgacgctcctgctcctgtgctggtgttgtttccctggaaaggcgatgcaataccatacgggggtgcaaacaccggagtggaaaccgcggctggtgtggagttgtctggggctgtatatcgtctttctgacggcgctggagttcaaacaagagctgtggggactggtgattgtggcggcaggctttgcgctgctggcacgtcgcgtggtgctcagtgtggactggacgctgctgctggtgtttatggcgatgtttatcgacgtccatttactgacccagcttccagcgttgcaaggcgtgttgggtaacgtgagtcatctatctgaacccgggttatggttaacggcaatcggtttaagccaggtgatcagtaacgtgccgagtaccatattgttgctgaactatgtgccgccgtctttattactggtatgggcggtaaacgtaggtggctttgggttattacccggaagcctggcaaatttgattgcgctacgtatggcgaacgatcgccgcatctggtggcgtttccatctctatagtataccgatgctgttgtgggcggcgttggtgggatatgttttgttagttatactcccggccaactaaggtctggcaaataaaaaaggcggattatgagtccgccttttgctttaagttttgaagattaattcagacgaaccggcatcccggagcggtttttaatcgcttcatcaagaacaacctggtcaacatctggctgaccggtcactgtctgcacgctcttcgtcagggtaattggcacaatttcctgaccttcaaactgggcttcggtggtagacagcgggttatggacttcaatataacggctgccgtctggctcggtggtcgcttttaccggctcatcaataaactgtacgcgggtaccgaccggtactttctcgaacaggaatttgatgtcttcgttacgcagacgcacacaaccatgacttacacgcaggccgataccgaagttggcgttggtgccatggatagcatacaggcgaccgatatagagtgcatacagccccatcgggttatccggacctgccggaacgacagccggaagcggttcgcccgcagcgcggtactctgcgtgcattttggcggtcggcgtccaggtcgggcctgcttttttacgctcaactttggtggtccagttgataggcgtatctttgcctaactgaccaatgccgatcggcagcacgataacggtgttggtccctttcggatagtaataaagacgcatctcagcactgttaatgacgatgccttcatgaacggtatccggcaggatcagctgctgcggaatgttcagtacagtaccgcctttcggcaggaaggtatccacacccgggttcgcttccatcatattggaaagccccatctggtactcggcggcaaaatactccagcggctgagtgttaccttcaggaatggtgatcacctgattctgaccaaccaggcgactcccgtcggttggcagaggataagttaccgcagaggcggtactgcaaaagccgacaacagcgaaggccgctgcgaataatgttttcaatttcatattcatgttaagcgagattttgtgcctggcaggccattgggttgagaatattagagtattggaagcgcattataagttcattccagctcacagtgaaatcagatgtgtacgaaatcacattttttgcctttggcttgagtgtagaccttaagcgaggagcaggatcttctttcagacttatggcataatgcgcggtttgtcatatctcttttcaggatacgcctgtgttagtttccagtaacgtcaccatgcagttcggcagtaagccgttgtttgaaaacatttccgtcaaatttggcggcggcaaccgttacggcctgattggcgcgaacggtagtggtaaatccacctttatgaagatcctcggcggcgaccttgagccgacgctgggtaacgtttccctcgatcccaacgagcgcattggtaaactgcgtcaggatcagtttgcctttgaagagttcactgtgctggatacggtgatcatggggcataaagagttgtgggaagtgaagcaggagcgcgaccgcatctatgctttgccggaaatgagtgaagaagacggctataaagtggccgatctggaagttaaatacggcgaaatggacggttactctgcggaagctcgcgccggtgaactgttgcttggcgtgggaattccagtggaacagcactacggcccgatgagtgaagttgctcctggctggaagctgcgtgtgcttctggcgcaggcgctgtttgctgatccggatattctcctgctcgacgaaccgaccaacaacctcgacatcgacaccattcgctggctggaacaggtgctgaacgagcgtgacagcaccatgatcatcatcagccacgaccgtcacttccttaacatggtctgtacccacatggcggatctggattacggcgagctgcgcgtttatccgggtaactacgatgagtacatgacggcggcgacccaggcgcgtgaacgtctgctggccgataacgccaagaagaaagcgcagattgctgagttgcaatctttcgttagccgctttagcgccaacgccagcaaatctcgccaggcaactagccgcgcgcgccagattgataaaatcaaactggaagaggtgaaagcctccagccgtcagaacccgttcatccgttttgaacaggataagaaactgttccgtaacgcgctggaagtggaaggtctgaccaaagggtttgataacggtccgctgtttaaaaatctcaacctgctgctggaagtgggtgaaaaactggcggtactgggtaccaacggcgtcggtaaaagtacgctgctgaaaacgctggtgggcgatctgcaaccggacagcggcaccgtaaaatggtctgagaacgcgcgcattggttactatgctcaggaccacgaatatgagtttgaaaatgatctgaccgtgttcgaatggatgagccagtggaagcaggaaggcgatgacgagcaggcggtacgcagtattctcggtcgtttgctgttcagccaggacgacatcaaaaagccagctaaagtgctttccggtggggaaaaagggcggatgctgtttggtaagttaatgatgcagaagccgaacattctgatcatggacgaaccgaccaaccacctggatatggaatccattgagagcctgaacatggcactggaactgtatcagggcacgctgatctttgttagtcacgaccgtgagttcgtaagctccctggcgacccgcattctggaaatcaccccggaacgcgtgatcgactttagcggtaattacgaagattacctgcgtagtaaagggatcgagtaagtgattatccgtcaccccgatactgtcggggtgacggcggctgatgacaaatgcaaaatagcctgatgcgctacgcttatcaggcctacgcagtacctgcaatatattgaatctgcaggactttgtaggccggataaggcgttaacgccgcatcaggcattaacaaagcgcatttgtcagcaatctgagtaacgtcgaatcgattttcttaatcccacatcaattcacttccattaattctcaaacatccatgcccaacgctcgcttaccgtgaatgttgaggtcggcaagcgtaaagcgtccttcccagtttgtttcatagtcctcgcgcgggaagtcgcccgggcttgcgcctttttccagtgcggccttcaccttgtgcgcgtaggcaagatttttctcgcacatcggtgccgcaggaatgtacatcacgttgccccaaccttgttgattttcaacgggggcaacggaatggatgacgtcgcagtgccaccagacggagtctccggcttcgagttttggaatgctggttaacgcctcaatcaacagtggatgccattgctcacttaccggcaatactcttccgggcgctacgccgcacagttcatcctccggcacatcatcaagcagcggacgtaacagtacgtacgccatagcttcaggaatgggcacgacgtgcagcagcccctgaccaggcagcatatcagagagcgctgtccagccctggaatgtccgaaacacggaacatttggtggtgttgtccaccgtgtactcttcaacttccgtacgatgtgccgcatgccagggatcatattgcgccagattgccattaaagacgttggcgaaaacgcgctgatacgctggaagcagccagcgttccagtgccccggagtcggtatgcgctccaagacctttggaggtcgttccgggcggacggcggcggatacggtcagggtagatgacgctcacatccgggttaaaccattgctttccatcactttcaaatgtccacagacgattgagaaagctctgcgcattcgccatttcttcactctggcgggcctgcatttgcgcctggctccagtagatggggtaaatctcgggacgactagcgctgagcgtcccgaagaaattatcgccggggcctttgtagacctcgtcaaagcggttgcggtccagatagtccagcatgctctgatcccagcctagcgcttgttcgcgggggaaatggccttttatcaccgcacaaccgcgacgtttaatctgttcgcgctgctctgcagtaacatgacctgctttgatatcggcataagacagcaccggccagacggcatcgccctgtgctttgagtgcgttgatttcagccactcgcgtggcaatgtcatcgcttagctgattaaagatctgctggacgtcgccaagctgcgcccgcagcgcgtgcttcatctgacggatagctgctttgtgatcggcaggcaatgtgtcgctggtaaaagtagaagccataaccacctctcattaactttcattcgaaaccattctgatttgcatgtgacaatataagttataaataagttaatgcaagtttaatgatttgatgtgatgtacaggatgtaaaaagaagggaaaaccggagcgcacggctccggtagagaggtcagctgttaaaaggggatgtgttatccagcaccgcctgaatcacattcagcgcgccttcatgattattatcatcggtagcgtaacgggcgatttgtttaatgttttccgcagcattgcccatcgcaaaggaataacgcgccattttcagcatctccgcatcgttaccgctgtcgccaatcgctaccacattttgcggactcagatcccagcgtttcagtaaccggctaataccgtttgctttatgtagaccgggaataatcaggtcgataaagccaaaaccactggtaacgggtttcataatgccatcgagcgctacgtgcagtttgtcgatcactaacgggatttgttcatccggcaggttgaggctaaacttgaacagtacgtcgtcaatctcctgataatcttttacaggtttcaggcgatggtagtgttttgccatcagtgcgacaaatgcttcgggggcattttcgctgacatatgcactttgcagaccgcaggcgacaaaattgagttgcttatcttttagcaactcgccaataacaatccggctttcatgtcgggtcagttcgccgtggaacaactgcttgccatgttcgtaaaccagtgcgccgttttccgcgacaaaagagatctcatcctttagctcaggaaagaaactaataagctggtaatactgattaccgctggcaacaacgaacttaatgccgcgctttttcagttcctgatattgcgccataaaacgtggttggttgtacgttttggcgtcgttaagaaaagtaccgtccatgtctgtgacgataacttttacgctcataggtgtgctcctggctcgaaaatgaaaccgtaacagtgtaataacaatgtgacgcagagcacaaattatatttcgaatgaaagtaaggatgaaattgatgatgtgaatgatttagcccggcgacgacgccgccgggccgaggagattacagcatatgttcagtacgggcgatgatatcgtcctgagcgtctggagagagcgcggtgaagaacgcggaatagcccgcgacacgcactaccagatcgcgatactgatcgggatgttttttcgcatccagcagcgtttcgcgggaaacgatgttgtactgaatatgccagcctttatgcacttcaaagaaggtacgcagcaggatcatcagtttctgcttgtcagattcgttctccagcgttgccggattcagtttctggttgagcaacacgccgccgagaatcgctgccgtaggcagtttacccacactgccaatgaccgcagtagggccaagatggtcagtaccggaggccgggcttgcgccttctgccagcggggtgtgggctttacgcccgtccggtgttgccatagtctgcgcgccaaacggtacgttagcggagatactactcgtacccgcgtaatagttgccgccaaccggaccacgaccgtagcgcggattatggtactgtttcagttcgtcgatataggtctgataagcgcgagccagcagcgtatcgacagtatcatcgtcgttgccgtacttcggcgcaccgttaatcagccgctgacgcagctgctcgtgagtcaggccgtcgaagtcatctgccagtgcggcagcaagctgttgctgaccaatcgcaccttgttcaaacaccagtttcttcactgccgccaggctgttgccgaggttggcaatgccgacctgcaggccagaaacccagtcatatttcgcgccgccttgcttgatacttttcgctcgctcaatacagtcatccaccagcgcgctgcagagaatatcgtgcacgttctcttccagcatggtgtcgacgacatattcgatttcgatacttttgcgggtgtagtaacggatttgcgtatcccacgcgtccatcacttcatcgaagttgttgaagttacctgcgctcaacgctttttcttgtggcaggaacactttgccgctggtggcatcatgcccgccttccagcgccgccagcatcacgcgggcgaagttgataaagctcatgccggtacagcgatagccccatttgccaccgacggcggtttctatacaaccaatcgctgcgtagtcataagcgtcctgcggttcaataccgagtttaataaattccgggatcacgatttcgtcgttgttgaacgccggcatcccgaagccgcaacggatcacctgtacgcaggcgtcgaggaaatcgttgctcattcctgcatggtaacgcacgctgaggttaggctgagtggaacgcaggcgaccgcaggattcgaggatcgcgtaagagagtggattcaccgcgtccattggttgaccatcaaccagattttgcccgccaatagtgacgttctgatacagcggacttcccgcagaggctttactgtgactgccggagcggatcttgttcacttccagcagtttcagccagcagctatgcagcatctcgatggcgtgttcgcgatccagcgtctggttgagttcaacgtcgcggcgatagtacgggtagagatactggtccatacgaccaaagcttacactgtgaccgttagattcgatctgcaaaatcaactggatgaagtaacacagttgcagcgcctgccagaaagtctgcggcggctggtgggcgataagatcgcagttttctgccatcgccagcagttcatcgcgacggctttcgcgggtttcggtcgcggccatttcacgcgccagggcagcgaaacgttcaatgtgttcactgactgccaccagcacgatatcaatcgctttcaggaattgctcaccgtgtaaatcttccagcaccgtcaggttgatgcggctgcgacgttccgctacttcctcgcgcagaccatcaagccctttttccagcagcagcgggaaattcaccgccaggtgcgcatcgccggaggtcatattgccttccgctttaatgattccggtcgccagcagacctttttgctcatcggtaaacatgccgtagcagcgatcctgtacggtctgaccgcgccaccacgggcacacttcatgcagaacgcgtttgttctcttcgctcaccgcaaagccagcaccgggacgatctgccagatcatcaatctctttttcgatccagctgacagtatattccgggaagatcggcgcggcgcgaacttcgcttgcctggttgccaatgatcaactcatcgtgtttgatccagatggtgcgattcgccaggtgatgcgccagtgccagcgcgcgacgtaccgggatcggcttatcgagatgttgttgatacatctcggtatagtgctgcgcgcgctcggtacagactggcggtttcacaatatgcaccagcgcatttttgtgcgctttaatgcggtcgctgagcgtgtccagtttcagtgtggtcatggttgttatcctcgtaaggtcgcggttaaccctttctggcaggcatactgctgggcaaagtcgagcagttctggcgcatcaagcggtttttccggggcgtcatagggcagattaagtaagtgatatttgttgatgcccagcgtgtggtagggcagaaaatgaatttcgccaacgtgcagctcgtcggcggcaaaatcggtaatggcttttacagaggtttcgtcggcattaaagccctgaatcagcggcacgcggataatgatttttttgcccgctgcggcgagttttttcaggttatccagcactctggcggcgttaccgtcggtccactgtttaaacggcgcgtcggcaacgtgttttaaatcggcaagaaacagatcgatatagggcagagaaggggcgatatatttccacggcacatgcagacaggtttctaccgcagtatgaatgcctgcctcgtggctggcttgcagtagcgccatcgccatttccggctgcataaagggctcaccaccgctaagcgttaaaccgccgccgctgcgatcgtaaaacggtttatcgcgcagaacggtcgtcatgatctcctcaacgcttttcacttcaccacacacggttaatgcctgtgtcggacagcagtcggttaacgccgtcagatgctccggggttaacttttcccgatgaataagcaaaccattcagcgcgcgctcaatcacttccggcgcggccttagcgcacagctcgcagccttccagacacagtcgtgcgtcatacagcagatcctgcgtgcgggcgcggctttccgggttctgacaccagcggcagcccaggctacagcctttaagaaatacgaccgtgcggataccggggccatcatgggtgctgtagcgctgaatattgaaaatcatagttgcctctctatttcgttcaagcattaaaatactttcgaatgaaagttagattgatgtgcgtcaactgttcagagagttttcccgtgatagtctacattcagacaaaaagtacattttgaggatggttatggaactgtatctggatactagtgacgttgttgcggtgaaggcgctgagtcgtatttttccgctggcgggtgtgaccactaacccaagcattatcgccgcgggtaaaaaaccgctggatgttgtgcttccgcaacttcatgaagcgatgggcggtcaggggcgtctgtttgcccaggtaatggctaccactgccgaagggatggttaatgacgcgcttaagctgcgttctattattgcggatatcgtggtgaaagttccggtgaccgccgaggggctggcagctattaagatgttaaaagcggaagggattccgacgctgggaaccgcggtatatggcgcagcacaagggctgctgagcgcgctggcaggtgcggaatatgttgcgccttacgttaatcgtattgatgctcagggcggtagcggcattcagactgtgaccgacttacaccagttattgaaaatgcatgcgccgcaggcgaaagtgctggcagcgagtttcaaaaccccgcgtcaggcgctggactgcttactggcaggatgtgaaagtattactctgccactggatgtggcacaacagatgattagctatccggcggttgatgccgctgtggcgaagtttgagcaggactggcagggagcgtttggcagaacgagcatttaaccggacgttctgcatcctcataaattgctgatgacgtggcggagtgccgcgtcttatcaggcctggaggtggcaattactgcccacacacctcacaccccggattacgcatcagtttcatttcgcgaaactgacaggtcatcgcatcgtacatgacgattttcccgctggccggtttgccataacctgccagcattttgatcgcttccattgcctgcaagctaccaattacgccgatcaacggtgccattacgcctgcttccacgcaggttaatgcattttcaccaaacaaacggctaaggcagcgatagcacggttcaccgtcctgataagtaaagacggtgatttgaccttccatacgaattgccgcgccggaaaccagcggtaccttcgcggcaaaacagcctgcgttcagttgattacgtaccgcaacgttatccgtacagtcgagcaccagatcgtgttcagcaatcaatgctgcaagttctgcgtcatccagcagtgcattgactggcgtaatcgcgatatgtgggttgatccgcgtcagggcgtcacgggcggattccaccttcggttgcccgaccgtggcatcactgtgcagtgtctggcgttgcagattgctgaggctaaccgtgtcgaagtcgagcagcgtcaggttaccgacaccggcgcttgccagatactggctggctgcacagccgaggccgcccaggcccactatcagcacgcgagaatctttcagcgcctcctggccgtcaaaatcaaagccgcgcagaatgatttgccggttgtagcgcagcatctcctgatcgctgagttccgccattacaggcctccgaacaacgcgttaaacggttctacttccacccattcgcccacttccacattgccgcgatcgcgttccagcacgataaagcagttgccgaggctaaaggagctaaatatatgactaccctgatgtccggtggtcgtcacttccagttcgccatcggcgttgcgttgcagcacgccgcgctggaaatcaagacgtcctggcgtttttttcaggcgggacgctgtgcgtacgcgctggcgcgcgggcaggccgctggcggtgttaccgcttagttttgccagcaaaggctgtaccagttgatagaaggtcagcgtcgcactaaccgggttgcccggcaggccgcagaaccagctattgctgagtttaccgaacgcgaacggtttacctggtttaatcgccagcttccagaaggcgatctcccccagctcttcaagaatcgttttggtgtaatccgcctcacccacactaacaccgccggaactgatcaccacatccgcctggctgtcggcttcaataaatgcggcgcgcagggcatggggatcgtcgcggataatccctaagttaattacctcgcatcccaactgttctaacatcaggtgtacggcgagacggttggtatcgtagatttggccgtcgcccagcggctgaccgggcaactggagttcatcaccggtagaaaaaagcgctacacgcactttacgaatcaccggaacttcggcaatccccagactagcaattactggcagctctgcggtagtcaggcgagttcccgccgggaaaacaaccgcacctgcagagatatcttcaccgcgacggcgaatattttgcccgctacgcacttcagcagtaaaacgcacgccattgtccatttgttcagtctgctcctgcatcaccaccgcttcgcagccttccggcaccggcgcaccggtcataatacgaatgcaggtacccgcaggccattcaccatggtatggctgaccggcaaaggatttaccggcaacgggcagcggttgcccggaggcaatatcggctaaacgcaccgcgtagccgtccattgcggagttatcaaaccccggaacatcaagcgggctaacgacatcgctcgccagaatacgaccaaaacactgtaccagtggcagcgtttcctgggcggtcagtggggtgacgcgagaaagcatctcattaagcgcggtgtcgaggctcatcaatccggtggtaaattccatgaaaacactcctgcggaggcaaaatcgaatttgcctattatgtcagaaaaacgccacagactgtatgccacctcgggcgtagcgctgggtcctgcctttacatgccatatccatctttctatattcaaaaattgaatgagtaattcataaaaattctgatatttatagcaaaagtggcgaaccacccttaatggacgaatactatgggcaaagcagtcattgcaattcatggtggcgcaggtgcaattagccgcgcgcagatgagtctgcaacaggaattacgctacatcgaggcgttgtctgccattgttgaaaccgggcagaaaatgctggaagcgggcgaaagtgcgctggatgtggtgacggaagcggtgcgtctgctggaagagtgtccactgtttaacgccggaattggcgctgtctttacgcgtgatgaaacccatgaactggacgcctgtgtgatggatggtaacaccctgaaagccggtgcggtggcgggcgttagtcatctgcgtaatccggttcttgccgcccggctggtgatggagcaaagcccgcatgtgatgatgattggcgaaggggcagaaaattttgcgtttgctcgtggcatggagcgcgtcagcccggagattttctccacgtctttgcgttatgaacaactactggcagcgcgcaaggaaggggcaaccgtcctcgaccatagcggtgcgccactggatgaaaaacagaaaatgggcaccgtgggggccgtggcgttggatttagacggcaatttggcggcagccacgtccacaggcggaatgaccaataaattacccggacgagttggcgatagtcccttagtgggtgccggatgctacgccaataacgccagtgtggcggtttcttgtaccggcacgggcgaagtcttcatccgcgcgctggcggcatatgacatcgccgcgttaatggattacggcggattaagtctcgcggaagcctgcgagcgggtagtaatggaaaaactccctgcgcttggcggtagcggtggcttaatcgctatcgaccatgaagggaatgtcgcgctaccgtttaacaccgaaggaatgtatcgcgcctggggctacgcaggcgatacgccaaccaccggtatctaccgtgaaaaaggggacaccgttgccacacagtgatgaacttgatgccggtaatgtgctggcggttgaaaatctgaatattgcctttatgcaggaccagcagaaaatagctgcggtccgcaatctctcttttagtctgcaacgcggtgagacgctggcaattgttggcgaatccggctccggtaagagtgtgactgcgttggcattgatgcgcctgttggaacaggcgggcggtttagtacagtgcgataaaatgctgttgcagcggcgcagtcgcgaagtgattgaacttagcgagcagaacgctgcacaaatgcgccatgttcgcggtgcggatatggcgatgatatttcaggagccgatgacaagcctgaacccggtatttactgtgggtgaacagattgccgaaagtattcgtctgcatcagaacgccagtcgtgaagaagcgatggtcgaggcgaagcggatgctggatcaggtacgcattcctgaggcacaaaccattcttagtcgttatccgcatcaactctctggcgggatgcgccagcgagtgatgattgcgatggcgctgagttgccgcccggcggtgctgattgccgatgagccaaccaccgcgctggatgtcactattcaggcgcagatcctgcaattaatcaaagtattgcaaaaagagatgagcatgggcgttatctttatcactcacgatatgggcgtggtggcagagattgccgatcgggtactggtgatgtatcagggcgaggcggtggaaacgggtaccgtcgaacagatttttcatgcaccgcaacatccttacacccgtgcgctgttagctgctgttccgcaacttggtgcgatgaaagggttagattatccccgacgtttcccgttgataagccttgaacatccagcgaaacaggtcccccccatcgagcagaaaacggtggtggatggcgaacctgttttacgagtgcgtaatcttgtcacccgtttccctttgcgcagcggtttgttgaatcgcgtaacgcgggaagtgcatgccgttgagaaagtcagttttgatctctggcctggcgaaacgctaagcctggtgggcgagtctggcagcggtaaatccactaccgggcgggcgttgctgcgcctggtcgaaagccagggcggcgaaattatctttaacggtcagcgaatcgataccttgagtcccggcaaacttcaggcattacgccgggatattcagtttatttttcaggacccttacgctagcctggacccacgtcagaccatcggtgatagcattatcgaaccgctgcgtgtacacggtttattgccaggtaaagacgcggctgcacgcgttgcgtggttgctggagcgcgtgggcctgttacctgaacatgcctggcgttacccgcatgagttttccggcggtcagcgccagcgcatctgcattgctcgcgcgttggcattgaatccaaaagtgatcattgccgacgaagccgttagcgcgctggatgtttctattcgcgggcagattatcaacttgttgctcgatctccagcgtgatttcggcattgcgtatctgtttatctcccacgatatggcggtggtagagcggattagtcatcgtgtggcggtgatgtatctcgggcaaattgttgaaattggtccacggcgcgcggtcttcgaaaacccgcagcatccttatacgcgtaaattactggcggcagttccggtcgctgaaccgtcccgacaacgaccgcagcgtgtactgctgagcgacgatcttcccagcaatattcatctgcgtggcgaagaggtggcagccgtcagcttgcaatgcgtcgggccggggcattacgtcgcacaaccacaaagtgaatacgcattcatgcgtagataacattcaggcggagaataaaatggcaagagctgtacaccgtagtgggttagtggcgctgggcattgcgacagcgttgatggcatcttgtgcattcgctgccaaagatgtggtggtggcggtaggaagcaatttcaccacgctcgatccgtatgacgcaaatgacacgttatctcaggccgtagcgaaaagcttttaccaggggctgttcggtctggataaagagatgaaactgaaaaacgtgctggcggagagttataccgtttccgatgacggcattacttacaccgtgaaattgcgggaaggcattaaattccaggatggcaccgatttcaacgccgcggcggtgaaagcgaatctggaccgggccagcgatccggcgaatcatcttaaacgctataacctgtataagaatattgctaaaacggaagcgatcgatccgacaacggtaaagattaccctcaaacagccgttcagtgcgtttattaatattcttgcccatccggcgaccgcgatgattagtccggcagcgctggaaaaatatggcaaggagattggtttttatccggtgggaaccggaccgtatgaactggatacctggaatcagaccgattttgtgaaggtgaaaaaattcgcgggttactggcagccaggattgcccaaactggacagcataacctggcgtccggtggcggataacaacacccgcgcggcaatgctgcaaaccggtgaagcgcagtttgctttccccattccttacgagcaggccacactgctggagaaaaacaaaaatatcgagttgatggccagtccgagtattatgcagcgttatatcagtatgaacgtgacgcaaaagccgttcgataacccgaaggtccgtgaggcgctgaattacgccattaaccgtccggcgctggtgaaagttgcctttgcgggctatgcaacgccagctactggtgtggtaccgccaagtatcgcctacgcgcaaagttataaaccgtggccttacgatccagtgaaagcgcgcgaattactgaaagaggcgggatatcccaacggtttcagtaccacgctgtggagcagtcataaccacagcaccgcgcagaaagtgctgcaatttacccagcagcagttagcgcaggtcgggattaaagcccaggtgactgcgatggatgccggacagcgggcggcagaagttgaaggtaaagggcaaaaagagagcggcgtgcggatgttctacactggctggagcgctagtaccggcgaagcggactgggcactaagcccgctgtttgccagccagaactggccaccgacgctgtttaataccgcgttttacagcaataaacaggtggatgacttcctggctcaggcactgaaaactaatgatccggcggaaaagacccgcttatataaggcggcgcaggatatcatctggcaagaaagcccgtggatcccgctggtggtagaaaaactggtgagcgcacacagtaaaaacctgaccggtttttggatcatgccagacaccggcttcagctttgaagacgcggatttgcaataagcaacgcagggagtggaatgcttaattacgttatcaaacgcttactggggttgattccgacgctgtttatcgtcagcgtgctggtgtttttatttgtccatatgctgcccggcgatccggcgcgattgattgccgggcccgaagctgatgcgcaggttatagaactggtgcgtcagcagctggggttggatcagccgctgtatcaccagttctggcactatatcagcaatgctgtgcagggggattttggcctgagcatggtgagccgtcgtccggttgccgatgagattgccagccgctttatgccaacgctgtggctgaccataaccagtatggtctgggcggttatatttggtatggcggcgggaattatcgccgccgtctggcgtaaccgttggccggatcgattgagtatgaccattgcggtgagcgggatcagctttccggcatttgctctggggatgcttttaattcaggtattctccgttgaactgggctggctgcctaccgtgggagcagacagttggcagcactacattttaccctccctgacgctcggcgcggcagtggccgccgtgatggcgcgctttacccgcgcgagctttgtcgatgttttaagcgaagattatatgcgtaccgcgagggcgaaaggggtgagcgaaacctgggttgtcctcaaacacgggctacgtaacgcgatgatcccggtagtgaccatgatgggcttacagtttggctttttgctcggtggttccatcgttgtggagaaagttttcaactggccgggacttggacgcttactcgttgactccgtagaaatgcgtgattacccggtgattcaggcggaaattctgcttttcagcctggaatttattcttatcaacttagtggtggatgtgctttacgccgccattaacccggctatcaggtacaagtaaggatgcgactatttaactggcgacgtcaggcggtgttaaacgccatgccactggtcaaacctgaccaggtacgtacaccgtggcatgaattctggcgacgatttcgccgtcagcatatggcgatgaccgccgcattattcgttattttattgattgtggtggccatttttgcacgctggatcgctccctatgacgccgaaaattattttgattatgacaatctgaataacggaccttctttgcagcactggtttggcgtcgatagtctggggcgtgacattttcagccgtgtcctggttggtgcgcaaatcagcctggcggcgggcgtgtttgccgtgtttatcggtgcggcgatcgggacgttgctgggcttgctcgctggatattatgaaggctggtgggatcggctgatcatgcgcatttgcgatgtgctgtttgccttcccgggtattttactggcgatcgctgttgttgcggtgttgggaagcggcattgctaacgtgattattgcagtcgccattttttccatccccgcgtttgcccgcctggtgcgcggcaacacgctggtgttgaaacagcaaacctttattgagagtgcacgcagtattggtgccagcgatatgaccgttttgttgcgtcatatcctgcctgggaccgtctcttctatcgtggtgtttttcaccatgcgcattggtaccagcattatctctgccgccagcctcagttttctcggcctcggtgcgcagccgccgacaccagagtggggagcaatgctcaatgaggctcgagcggatatggttatcgcgccgcatgtcgctgtttttccggccctggctatttttctgaccgtactggcgttcaatttgttgggcgatggtttacgcgatgcgctggatccgaaaattaaaggataattacgtttgaatattgcttgaaagggtaatcacctcacaggaaattattgccctaagcaagtgttgtaactttctgctgattttgtagaatcgggtaatttggttaaaaagccgcagcaagggacaatttttgcagcggcacagcgttcagatagttattttgttaaatgtattaacatgctgagtttatacgaaaagataaagataaggctgataattttatttttattggcagcactgagttttattggtctttttttcatcattaactatcaactggtaagcgagcgcgcggtaaaacgtgccgatagccgctttgaacttattcagaaaaacgttggctatttctttaaagatattgaacgtagcgccctgacattaaaggacagtctgtatttattaaaaaatacagaggagattcaacgcgccgtgattcttaaaatggaaatgatgccatttttagacagcgtgggactggtacttgatgataataaatattatctttttagccggagggcgaatgataaaatcgttgtttatcatcaggaacaagtaaatggaccgcttgtcgacgagagtgggcgggttatttttgccgattttaacccaagcaaacgaccgtggagcgtggctagtgatgactctaacaacagctggaatccggcatacaattgctttgatcgtccgggtaaaaaatgtatctcttttacgctacacatcaacggcaaagatcacgatttgttagcggtggataaaattcatgtcgatttaaactggcgatatctgaacgagtatcttgatcaaatcagcgctaatgatgaagttctatttttgaaacaaggccatgagatcattgccaagaatcaactcgctcgtgaaaaactgattatttataatagcgaaggtaattataatattattgattctgtcgatactgaatatatcgaaaaaacaagtgcggtgccaaacaacgcattattcgaaatctatttttattatcctggcggtaatttattgaacgcaagtgataaacttttttatctgccgtttgcgttcattattatcgtattgctggtggtttatttaatgaccactcgtgtgttccgtcggcaattttctgaaatgacagagctggttaatacgctggcgtttttgcctgacagtacggatcaaatcgaggctctgaaaattcgtgaaggcgatgcgaaagagattatcagcatcaaaaatagcatcgcggaaatgaaagatgccgaaattgaacggagtaataaattgctcagtctgatctcttacgatcaggaaagtggttttattaaaaatatggcgattattgagtctaacaataatcagtatctggctgtggggatcatcaaactgtgtggtctggaagccgtggaagcggtgtttggtgttgatgagcgcaataaaatcgtcaggaaattgtgtcagcgaattgccgagaaatatgcgcaatgctgcgatatcgtgacattcaatgccgatctctatttacttctgtgtcgggaaaatgtacagacatttacccgtaaaatagcgatggtaaacgattttgacagcagctttggctaccgcaatctgcgcatccataagtctgccatttgtgaacctttgcagggggaaaacgcctggagttacgcagaaaaactgaaactggcgatttccagtatccgtgaccatatgttcagtgagtttattttctgtgatgacgcgaaactcaacgaaatagaagagaatatctggattgcgcgtaatattcgccatgcaatggaaattggcgaactattcctcgtctatcaaccgatcgttgatattaacacccgcgccattctgggcgcggaggcgttgtgccgttgggtgtctgcggagcgggggatcattagtccgctgaagttcattaccattgctgaagatatcgggtttatcaatgagctgggttatcagattattaaaacggcaatgggtgaattcagacattttagtcagcgtgcgagcctgaaggatgatttcttactgcatattaatgttagcccctggcagttaaacgaaccacactttcatgagcgttttaccaccatcatgaaagaaaatggcctgaaggcgaacagcctctgtgttgagatcactgaaaccgtgatcgagcgaattaatgaacatttttatctcaatattgaacaactgcgtaaacaaggggtacggataagcattgatgactttggcaccggtttgagtaacctgaaacgtttttatgaaattaatccagacagcataaaggtggacagccaattcaccggcgatattttcggtactgcgggaaaaattgtgcgcattattttcgacctggcacgctataaccggatcccggtgattgcggaaggcgtagagagcgaagacgttgcgcgcgaattaatcaaattaggatgtgttcaggctcaggggtatctgtaccagaaacccatgccattctccgcctgggataaaagtggaaaattagtaaaagagtaatttacgtatgtccagaatcaataagttcgtacttacagtcagtctgctgatttttatcatgattagtgcagttgcctgcgggatctacactcaaatggtaaaggaacgggtgtatagcctgaaacagtccgttattgatactgcttttgcggtggcaaatattgctgaatatcggcgtagcgtggcaattgatcttatcaacacgctaaatcccacggaggaacagctgttggttggtttgcgcacagcttacgccgacagcgtttccccctcttatttgtacgatgtcggtccttatctgatttccagtgacgaatgtattcaggtaaaggagttcgagaaaaattattgtgcagatattatgcaggttgtgaagtatcgacatgtcaaaaatacagggtttatctcttttgacggtaaaaccttcgtctattacctctatccggtaactcacaatcgtagtctgatatttttgcttggtctggagcgtttttctttactgagtaaaagcctggcgatggacagcgagaacctgatgttctctctatttaagaacggtaaaccggtgaccggtgatgaatataatgctaaaaacgccatcttcaccgttagcgaagcgatggagcacttcgcctatttgccgaccggattgtatgtatttgcgtataaaaaagatgtttatttgcgggtttgtacattgattattttctttgccgcattggtggcagtgataagcggtgccagttgcctctatctggtacgcagagtgattaatcgtggtattgtggagaaagaagccatcattaataaccattttgaacgcgtactggatggcgggcttttctttagcgctgccgatgtcaaaaaactctacagtatgtataacagcgcgttcctggacgacctgaccaaagcaatgggcagaaaatcctttgacgaagatttaaaagcgctgccggaaaaaggcggttatttgtgcctgtttgacgtcgataaattcaaaaacattaacgacaccttcggtcatttgctgggcgatgaagtgttgatgaaagtggtgaaaatccttaaaagtcagatcccggtagataaaggtaaagtctaccgcttcggcggtgacgaatttgcggtgatttatacgggtggaacgctggaagagttgctaagcattctaaaagaaatcgttcatttccaggtgggaagcattaatttaagtaccagtatcggtgtagcacatagtaatgaatgtcctaccgtcgaacgcttgaaaatgctggcggatgagcggctgtataagagtaagaaaaacggcagggcacagattagctggcagtaatcattattcgcaggccggacaaatgattttgcccggcctgaattaattaaacccggctaccccacaaatcgtactcatcggcgtgctcgactttcacacgcaggatatcacccggcttaacgttggtttcaccattgagataaaccgcgccgtcgatttccggtgcatctgccatgctgcgaccaatcgcgccttcttcgtccacttcgtcgataatcaccagaatttcacggcccactttctcttgcaggcgctcggcggaaatctgctgctgcagctgcatgaaacggttccagcgttcttctttaacttcttccggaacctggtcaggcagggcattggcgtctgcaccttcaaccgggctgtatttaaagcagccaacgcgatccagacgcgcttctttcaggaagtcgagtagcatctggaaatcttcttctgtctcgccagggaagccgacaataaaggtactgcgtagggtcagttccgggcagatttcgcgccactgtttgatgcgcgccagttggcgatctacagaacccggacgcttcatcagtttgagaatgcgcgggctggcgtgctgcaacggaatgtccagatacggcaggattttgccttctgccatcagtgggatgacgtcgtccacatgcggataagggtaaacgtagtgcagacgtgtccagatccccagtttgcttaactgttcgcacaggctgaccatgctggtttttaccggctcgccgttgtggaagccagtacgatgtttaacatcaacgccataggcggaagtatcctggctgatcaccagaatctctttaacgcccgcatctaccagacgtttcgcttcacttaacacttcgccaatcggacggctcaccaggtcgccgcgcatagacggaataatgcagaaggtgcagcggtgattacagccttcagaaattttcagataggcataatgacgcggcgtcagtttcacaccttgttctggcaccaggctcaggaatgggttgtgtttcggttttggcacgtagtgatgaacgtgctccagaacctgctcatagctatgaggcccggtgatttccagcactttcgggtggacttcgcggatctgatcttcttttgcccccagacaaccggtcacaataaccttgccgttttcattcaacgcttcaccaatggcttccagactttcttgtaccgcgctgtcaataaagccgcaggtgttgacgatcaccatgtccgcatcgtcatagctcggtaccacgtcataaccttcagtgcggagttcggtgagaatacgctcactatcaacaaggtttttcggacagccaagggaaacaaagccgattttcggctggggagttactttgctcatagcttaaaaaatattcagttacaggaaaggtcagggcagggattctacagagttctggataaaatttgtatcgcaatctcattcgctggcggaggcgaaggaaatgtaaattttgttaattcggcgtgaagaattgatcctggacagcattttgctcaaaaaatagccatactatttaattgcaacaaggctgggaagaggaggatcgaagtatgttcgttgacagacagcgaatcgatctgctgaaccggttgatcgacgcacgcgttgacctcgccgcatacgtgcaactgaggaaggcaaaaggatacatgtccgtcagcgaaagcaatcatctacgagataacttttttaaactgaatcgcgaactgcacgataaaagcctgcggttgaatcttcatctggatcaggaagagtggagtgctcttcatcatgctgaagaagcattagcgacagccgcagtatgtttgatgagtgggcaccatgattgcccgactgttattaccgtcaacgccgataagcttgaaaattgtctgatgagcttaacgctgagtatccagagcctgcagaagcacgccatgcttgagaaggcctgaaaactaagggggagaaagcgtctcccccttcatgtttaagtttttgtaaaaatgaatttgttatctcctccactgactacgctttaagccagagtcaatccggaggcgttatgcatcgacaatcctttttccttgtgccccttatttgtctttcttccgctctctgggcggctcctgcaacggtaaatgtcgaagtactgcaagacaaactcgaccatccctgggcactggcctttttacccgataatcacggtatgttaatcactctgcgcggcggcgagttgcgtcactggcaagcaggaaaaggattatctgcgccgctttccggagttccggacgtttgggcgcacgggcagggcggcctgctggacgtggttttagcgcctgattttgctcagtctcgccgcatctggttaagttattccgaagttggcgatgatggcaaagccggaactgctgtgggttatggccgcttaagtgatgatctcagtaaagtgaccgacttccgcaccgtctttcgccagatgccaaaactgtctaccggcaaccattttggcgggcggctggtattcgacggtaaaggttatctttttattgctctgggcgaaaacaatcagcgcccgacggcgcaggatctggataaattacagggcaaactggtgcgtctgaccgaccagggcgaaatcccggatgataatccttttataaaggaatccggtgcgcgcgccgagatctggtcttatggcattcgtaatccgcaaggaatggcgatgaatccgtggagtaatgcactgtggctgaatgaacatggcccgcgcggtggtgatgaaattaatatcccgcaaaaaggcaaaaactacggctggccgctggcaacctggggaatcaactatagtggctttaagataccggaagcgaaaggggagatcgtcgccgggaccgagcaacctgttttttactggaaagatagccccgctgtgagcggcatggccttctataacagcgataaattcccccagtggcagcaaaaattatttattggcgcgctgaaagataaagatgtcattgtgatgagcgtcaacggcgacaaagtgacagaagatggccgtattttaacggacagagggcagcgaattcgtgatgttcgcactggacccgacggttatttatacgttctcaccgacgagtccagtggggaattacttaaagttagcccacgcaattaactaacgggaatcatcaccactttgcgcactgcggggcgttcagtgagttgctgataccagcgttgcagatttggacgcggtgtccaggtcaggccaacgttaaacaaattgtagatgaacggtgcgatagcgatatcgcccacaccaaactcgtcgccagagaaccattttacttttgccagttccgcatcgagcagggcaaacagggcgtcgcactctttgcaactggcatcaatggcggcctgatcgcgctcttccggtggtgttctgactaatcccatcaggatcccgcgatgagcattactgagcgtctggtttgcccagtccatccatttttccgcttccgcacgacgtgccggactgtcgatccacaggcgtttttgcccgtactgtgccgccagatagcggacaatggcgttactttcccaaagaatgagatcactttcgtcgtcacgcaacaacggcaccagcccgttagggttcatcgccagaaaatcagcatcgtgatttatcccaaactcacggcccgcgagaatttgctcataaggtagttccagttcttcgagcgtcagcaatactttttttacgttagtactattattccgaccccacagcgtaatcatactcaccccttttccgacaggcagccacaggctgaacaggactccgatggtgaagtaaagttaacttttaagcaacagctggcaaaaaaatgacaccagaagcagcgaagcggcaggatattgcataaactttaaaaactttaccaacttacggtttctttaagtttgtgtgtgcgttattaatcaccaaacttatcatacggcgatataacgtattttttttgaatggatactcgggtggcatttatgacgcaatactcctctctccttcgtggtcttgcagcgggttctgcatttttattcctttttgccccaacggcattcgcggcggaacaaaccgttgaagcgccgagcgtggatgcgcgtgcatggattttaatggattacgccagcggtaaagtgctggcagaaggcaatgcggatgagaaactggatcccgcgagcctgactaaaatcatgaccagctatgtggttgggcaggcgcttaaggccgataagattaaactcaccgatatggtgacggtcggtaaagatgcctgggcgacgggaaatccggcactgcgtggtagtagcgtaatgttcctcaaaccgggcgatcaggttagcgtggcagacttgaacaaaggtgtgattatccagtccggtaatgacgcctgtattgcgctggctgattacgttgccgggagccaggagagttttattggtctgatgaatggttatgccaaaaaactgggtctgaccaacactaccttccagacggtgcacggcctggatgcgccggggcagttcagcaccgcgcgcgatatggcattgctgggtaaagcattgatccacgatgtgccggaagagtacgccattcataaagagaaagagttcaccttcaacaaaattcgtcagcctaaccgtaaccgtctgctgtggagcagcaatctgaatgttgatggcatgaagacaggaaccacggcaggcgcgggatataatctggttgctagcgctacccagggcgatatgcgtttaatctccgtagtgttgggggcgaaaaccgaccgtatccgttttaatgagtctgagaaattattgacctggggtttccgcttctttgaaaccgtgacgccaattaaacctgatgccacctttgtgactcagcgcgtctggtttggtgataagagcgaagtgaatctcggggcaggtgaagcgggcagtgtgaccataccgcgtgggcagctgaaaaacctgaaagcgagttatacgttaacggaaccgcagcttaccgcaccgctgaaaaaaggtcaggttgtcgggaccattgatttccagcttaacggtaaatccattgagcagcgtccgctgatcgtgatggaaaatgtggaagagggcggattctttggtcgggtgtgggatttcgtgatgatgaaattccatcagtggttcggcagctggttctcttaatcttctgataaccggatggcgcgaaacgtcatccggttatacgtcattaatacatcaacttaatgcgctgcgtctgcgcgtacttcacatactcatcttccgggcaacaatcgctcaccacaatatcaaagcgtttcaggtcacccatgcgcgccggacgcaccttgccaaatttactgtggtcgacaaccagcacatgcttttgcgccatgctcatggcccagtgttttaccggcaactcttcaagattaaaacaggtagcgcctttactgacatgcacgcccgccgcagaataaaaagcgatatccgggcaaaaattattcagcgtttgctgaaaatcgatgggtttgaaaatggcgttgctggcgtgaaattcaccaccgcaaagaaacgcgcggcaatggggtttctctttcagcgccagaaaggtatttaggctataacaaacggcggtaaaagggatttcattatcaatcgcttcaataatccacggcgtggtggtgccacagtcaaaaaagagggtctgatcgggttctaccagcgtcgcagccagttttgccgcccggcgtttttcttccaccaggcgggatttttgatcgcttaacaggtaatggctggcactgcgcggttccagaacaatatagccgccgagcaaaacgacgggcgcactgtggttgttcagatcgcgacgaatcgtcatctcgctaaccccaagcagggcggcggcgtctttaagatgtaacttatcgctgcgttttaattcttgcagcagctgcccgatacgctcttcgcgacgtgtttccataatccctctgaatagttattgaagcgagccgctcaatactacactttttagcagagatcagtcacgcacccagcctttgcggatcggtaatgcaaaacagacgcgataccagctttgcagacgttgatagagtttatgccccatcgcttgccagataatctgggcactaaggcagccaatcatacctgccagcaatccaccgagcatatccagcggccagtggacgccaagataaacgcggctccaggcaatgacgacggccagcaccattaaaagactgccggaccacaggcgatgccagcataaaaatgccagtgcaaaggtgaaaatcaccgtaccgtgatcgcttgggaaactgtcatccgccgcatgatgcaggaagttatagccgatattttcgacaaagggtcggtcgtgcggaaaaagatgtcccatcgtccaggacacaaacaggctgaccgccagcgcgatagcgatttttatcaccagttgccgttgtgctgtaagcccccacaaccaaagtaccacggccagcaacggcaccacggtaatcaaatctttagcaataaaaatcgccaagctgatcatccacggagcgctgtctggcgtcgcgttaataagagagaatagagagagattcaaattttccagcataacttcccgacgcaaagtgattaaaagggagccaatacaggcaagtcgttgagaataaagtgcaggttaaactgggtaaagcggcatcgtcttatttccctcaagcggcctgtttacggtgggtgattgtaacgggcataggttaaataaaacttaaagaaagcgtagctatactcgtaataatgtaagaatgtgcttaaccgtggtttcagctacaaaattcgctttctcgttagctgcgcttttattaaactctgcgcgattattattggcgaagaaattgcatgcaaaataaattagcttccggtgccaggcttggacgtcaggcgttacttttccctctctgtctggtgctttacgaatttagtacctatatcggcaacgatatgattcaacccggtatgttggccgtggtggaacaatatcaggcgggcattgattgggttcctactagcatgaccgcgtatctggcgggcgggatgtttttacaatggctgctggggccgctgagcgatcgtattggtcgccgtccggtgatgctggcgggagtggtgtggtttatcgtcacctgtctggcaatattgctggcgcaaaacattgaacaattcaccctgttgcgcttcttgcagggcataagcctctgtttcattggcgctgtgggatacgccgcaattcaggaatccttcgaagaggcggtttgtatcaagatcaccgcgctgatggcgaacgtggcgctgattgctccgctacttggtccgctggtgggcgcggcgtggatccatgtgctgccctgggaggggatgtttgttttgtttgccgcattggcagcgatctcctttttcggtctgcaacgagccatgcctgaaaccgccacgcgtataggcgagaaactgagtctgaaagaactcggtcgtgactataagctggtgctgaagaacggccgctttgtggcgggggcgctggcgctgggattcgttagtctgccgttgctggcgtggatcgcccagagcccgattatcatcattaccggcgagcagttgagcagctatgaatatggcttgctgcaagtgcctattttcggggcgttaattgcgggtaacttgctgttagcgcgtctgaccagccgccgcaccgtacgtagcctgattattatgggcggctggccgattatgattggtctattggtcgctgctgcggcaacggttatcagtagccacgcgtatttatggatgactgccgggttaagtatttatgctttcggtattggtctggcgaatgcgggactggtgcgattaaccctgtttgccagcgatatgagtaaaggtacggtttctgccgcgatgggaatgctgcaaatgctgatctttaccgttggtattgaaatcagcaaacatgcctggctgaacgggggcaacggactgtttaatctcttcaaccttgtcaacggaattttgtggctgagcctgatggttatctttttaaaagataaacagatgggaaattctcacgaagggtaaaaaaatgcctgactgctttgtgcgatcaggcattctcgaattaatggtgatggtcgtcaatctggtgttcgataaccatcccttcacctacgctggcaagatggcgaacataaggatgcgggcggtaagccggagctggcgcaggagccacatagacggtttgcggcacagtcgcgacgctgaccgcttgtggaacgctgacactatcaggaaccacaaccactttgtatccactcggcacatcgacggtgacactttgcgccatcgccacaccagtaaagcccattaaaagcgcgcccaacagtagacaatttttcataatcatttcgcctgaaataatgcagcgggttaatttccgcgaattatgcagccttcattcaggcattgtgttgccgggcgtgctgccggttttattggtcaaatggcgcttcgtgtttaagaactttatcgatcacatccagtacgccttcacggttattggagcctgcgcggtattttgccgctgcgacgaccgcgctaccggcattttccattgcaaaactaaagcctgcctgacgcagcatctcaatatcgttaccgccatcgccaaagaccaccacttcgctgtcgtctattccccataatttctgcagttggcgaaggccattggctttatgtacgccggggataatcagatcgatgctgccgttgccggtgtggacgctcaccataatatcgccgatggcctcatgtaatgctttttgtacttgtggaatcagttcatcggaaagattcaggccaaacttaaagaagatatcctctaagttgtcaaagttatcgacgtattccagacggtgataatacatttccgccaccgttttcatggcatcgtcatattttttgagtgtataggcactattttttccgcaggcaataatttccacttccgggcgcgtcagcaaatgttccacgacagtagcaaacgcatccttgcttagctcgccattaaaaacatctttgccttcgctcactacccagccgccgttttcagccacaaaggcaatttcattagcaatttcagggaagaaagagatcaactgataatattgattcccgctggcgactacaaagcgaattccttgtgctttcatttgctgatactgagccataaaccgctcacggttataggttttttgatcgcttaagaaagtaccatccatgtctaccgcaattaatttaatgctcatcaactattctccatcgccgtctgcgttttggtatcgggtttggcgacggctttcgcgacaatagccgcgagaataaccagcgccagtacaaccagcattgcactacgtaatccataatgttcgccgagatagcccagcagcggcggcccgacgaggaaagccagataaccggtcgttgctaccacactgacgcgggttggtgcatcggggccggtatcgctggcggcagaaatggtcagcgggaagcccaggctggcacccagtccccagagtacaacagacaccccagcgacccaggcgctatcgacaaaaataatcagcccaatacccaacgcccccattagtgcactggcccgaaccacggcaacgcgactgtaacggtcgatgaaccaaccgccggtgaagcgtccaacggtcatccccagggtaaaaccggcataaatcaggctgccggaagtagggctaaaaccgtgaccgtcaaccattaataagggtaaccagtcgttggcagaaccttcggcaaaggccatcgccagcaccacaacacctatcagcagcaactggatatcgcgataaaaaggtacgcctttttcgccatgctgggtgccatcggcagcatttttgcccgtaccgtcagggattgcctgaatggcgatataaataggtgcgatacctaccagcgccgccaataaaatgtgcaccgttgccggaacgccaaaggccgtcagtgccatcccgacacctgcgcctgccagcgtgcccaggctataaaaaccgtgcatcatcggcaaaaccgtcttattcatttctcgctcaacggcagcaccttcaacgtttatcgccacttccgcagaaccaaaacttgccccaaagacgccgagaccaacggcaaagagcagggggcttgtcagccagagtgccagacttaatatcatcatcccgatcaatgcgcaggacatcgtgaccaggatgacattacgtgtcccaaagcgtttcactaaccacgcgctgcagagaataccgctcatgctaccgatgctcagaccaaagagaacaccgcccatttcagcgatgctgacagagagaatatcgcggatagcaggcgtacgggttgcccaggacgccattaacaggcctggcaaaaagaagaacataaacagcgcccaggttcggcgtttcaatgcattacgactagaatttacggtcatagatcacgtcaaaataagaagagggaagacaacattagcaaggttgtgtacatttgtacacaattgcagagagaggaaatgacatgcgtcgcgctaacgatccgcaacggcgagaaaaaattatccaggccacgctggaggcggtgaaactttacggaatacatgctgttacgcaccgcaaaattgctacccttgccggggtaccgttgggaagcatgacctactattttagtggaattgatgagttgttactggaggcgttcagcagttttactgagatcatgtcccggcaatatcaggcattttttagcgatgttagtgatgctccgggcgcatgccaggctatcaccgatatgatctacagcagtcaggttgcaacgccggataacatggagctgatgtaccagctctacgcgctggctagccgaaaaccgctattaaaaacggtaatgcaaaactggatgcagcgcagtcagcaaacgctcgaacaatggtttgaacccggaaccgcccgcgcgcttgatgcgtttattgaggggatgacgctgcattttgtcaccgaccgtaagccgctaagccgcgaggagattttgaggatggttgagagggttgcagggtaatagataagttttagataacaaaaaacccatcaaccttgaaccgaaatggcggggttgatgggctccacaaaatggggacatcaaagaaaagcagtggcactaattaagactgatgccctgcggaaaagttctgcggttgtgcaaaaaaatttcattttcagggcaacttcagttttatcctaatcctggccataccatgacgatgattgtccctgccagcgtcagcaggacgttggcgattgcataggtgcccgcatagcccagcgccgggatgttactgcgagctgtatcactgatgatctccattgccggcgcgcaggtacgtgcgcccatcattgcgccgaacaacagcgcgcggttcattcgcaatacataagcaccgaacaagaaacagataaccacgggcaccagactgacaatcaatccggcaatcaacatctgaccgccaatcgcgcccaggccgttattaataccgctaccggcgctcagaccaacgcctgccataaacaccatcaagccgaactctttcaccatgcttaatgcaccctgcggaatgtaaccgaaggtcgggtggttagcacgcataaagcccagcataattccggcgaataacaacccggcagcgttccccatgccgaaactgaatgtgctgaactggaaggtgatcatcccgatcatcagcccaataacaaagaaggcgcagaatgccagcaggtcagtgacctggctgtgaatgctgataaagccgatgcgatcggcgatggtttttacgcggcgggcatcgccgctgacttgtaaaacgtcacctttgttaagcacgacgttgtcatctatcggcatctcaatctggctacgaatgacgcggttaaggaagcaaccgtgatcggtcaacttcagttgtgcgagacgtttacctacagcgttatggtttttaacgaccacttcttcagtgacgatacgcatgtcgagaaggtcacgatcgaaaacttctttaccgttacggaagctgggatcgagtcgggcatgggcgtcgggatagcctaccaacgctatttcatcgcccatttgtagcacggcatcaccgtctggatttgccagaatcccgttacgtcgaatacgttcaatgtagcagccggtttgtcgataaatacccagttcacgcagatttttgccgtcggtccaggccaccagttccgggccgacgcgataggcgcggatcaccggtaaataaaccttacggttggcatcagtgtccaggccacgttcgcgggcgatttgctgggcgctggtctgtaagtcctgatgctgcaatttcggcaagtaacgcgcaccaacaatcaaactcaccagaccgattaaataggttaaggcatacccgaggctcagattatccagtgccagactgagctgcctgctttccatgccggaatgacgcagtgtatcgccagcaccgaccagaaccggtgtgctcgtcatagagcctgctaacataccggccgtcaggccaatatcccagccaaacagcttacctaaccctaaggcgatcaccagcgcactgccaaccatcaccagtgctaacattaggtaatttttcccatcgcgaaaaaaaatggaaaaaaagttcggtccggcttcgaccccgacgcagaaaataaacagcataaagccaagattaagcgcatcggtgttaatgctgaaatgttgttggcctaataacaggcttacgactaaaacgccaatggaattacccagttggatgctaccaagtcgtaactttccgagacatagcccaagcgcgaggaccacaaataataacagaatgtaattcccatttaacaattcggcgacgtttatattcacggaggctaacttcttgtttactagtaagctgttgaaagaaatggtaatttacgataatgttttttaccagaattcagggcgcagattcattcagcgcacctaaacgatagtaaagtaacaatatattttactagtgtaatcacattaggtatcaacggctatatgaattgcgttggcctatattagcatggaatgcgaagcggctttatcttactgaacgccacactggcgaaaaatgtgttcgatagacgcagtgtcaggaggaacgagtgaaacataaacaacgttgggcgggggcaatctgctgttttgtcctcttcattgtggtgtgcctttttctggcgacgcacatgaaaggcgcttttcgggctgccgggcatcctgaaatcggcttgctatttttcattcttcctggagcagtcgccagcttctttagtcagcgtagagaagtcctgaaacctctgtttggcgcaatgctggcggcaccctgtagcatgctcattatgcggctgttttttagtccgacgcgcagtttctggcaagagctggcatggttactaagcgcggtgttctggtgtgcgctgggggcactgtgtttcttatttatcagtagtttgtttaaaccacagcacagaaaaaatcagtaaagccctcaacgcgagggcttgtcagacgatcaggcgtccagattttctttcacccatgcagcaaaatcggtatagccgccgatatgttgctgatcgacaaaaatctgcggcacggtttctacgggtttacctgccttttgttgtagatcttctttagtgatcccttccgcacgaatatctacatactgatactgaaaatcatcgcgttcattgctcaatttctcagccagatcttttgcacgcacacagtaagggcaaccgctacgaccaaaaataacggtttgcattatttctctcctcatagatttatgcctgtaatgatcacgctaaaatgtattcgctgaaagtaggtttaacctgttgcattaattgctaaaagctataactgttaaacacaatacagtgaaaagttttagactgaaggctcactttgcagagggaagcgtatgcgcgcgatcggtaaattgcctaaaggcgtgttgatactggaatttatcggaatgatgctactggcggtggcgctgctgagcgtaagcgactccctgagcctgcctgagccattttctcggccagaagtgcagattctgatgatttttctcggtgttttgctcatgcttcccgctgcggtggtggttattcttcaggtggcaaaacgtcttgccccacagctgatgaaccgtccaccgcaatatagtcgtagtgaaagagaaaaagataatgacgccaaccattgaacttatttgtggccatcgctccattcgccatttcactgatgaacccatttccgaagcgcagcgtgaggcgattattaacagcgcccgtgcgacgtccagttccagttttttgcagtgcagtagcattattcgcattaccgacaaagcgttacgtgaagaactggtgacgctgaccggcgggcaaaaacacgtagcgcaagcggcggagttctgggtgttctgtgccgactttaaccgccatttacagatctgtccggatgctcagctcggcctggcggaacaactgttgctcggtgtcgttgatacggcaatgatggcgcagaatgcattaatcgcagcggaaagcctgggattgggcggggtatatatcggcggcctgcgcaataatattgaagcggtgacgaaactgcttaaattaccgcagcatgttctgccgctgtttgggctgtgccttggctggcctgcggataatccggatcttaagccgcgtttaccggcctccattttggtgcatgaaaacagctatcaaccgctggataaaggcgcactggcgcagtatgacgagcaactggcggaatattacctcacccgtggcagcaataatcgccgggatacctggagcgatcatatccgccgaacaatcattaaagaaagccgcccatttattctggattatttgcacaaacagggttgggcgacgcgctaaaaccgccacgtcgatgtatgatacgcgggcttttgaccaggtctgacagagaggtgcagggtgaaaattgccatattgtcccgggatggaacgctctatagctgtaagcggctgcgtgaagccgctatacagcgcggtcacctggttgaaattcttgatccgctttcttgctacatgaacataaatcctgcggcgtcttctattcactacaaaggccgcaagttaccccattttgacgcagtgatcccgcgtattggcaccgccattaccttttatgggacggcggcactgcgccagttcgagatgctggggagctatccgctcaatgagagcgtcgccattgcccgggcgcgtgacaaattgcgttccatgcaactgctggcgcgtcagggcatcgacctgcctgtcacgggcattgcgcatagcccggatgataccagcgatttaatcgacatggtcggtggtgcgccgctggtggtcaagttggttgaaggcacgcagggaattggcgtcgtgctggcggagacgcgtcaggcggcggaaagcgtgattgacgctttccgcggtctgaacgcgcatattctggtgcaggaatatatcaaagaggcgcaagggtgcgatatccgctgtctggttgttggcgatgaagtggtcgctgcgattgaacggcgggcgaaagagggcgattttcgttccaatttgcatcgtggcggcgcggcaagcgtcgccagtatcacaccacaggagcgtgaaatcgcgataaaagccgcgcgaacgatggcgctggacgttgctggtgtggatattctgcgtgctaatcgcgggccgttggtgatggaggtgaatgcgagcccggggctggaaggaatagaaaaaaccaccggtatcgacatcgcgggtaaaatgatccgctggatcgaacgccacgctacgacagaatattgcctgaaaacgggtggttaatcgcaatcacattactgatcatggttttgcctgcgctttttgcgtaagctgtgccggtctttttatcgaaagaggttgtacaaaattatgacaagcctggtcgttcctggtctggatacgctgcgtcaatggctcgatgacctggggatgagtttttttgaatgtgataactgtcaggctctgcatctgccccatatgcagaatttcgacggtgtctttgatgccaaaatcgatctgatcgataacacgatcctgttttctgccatggcggaagtccgacctagtgccgtattgccgctggcggcggatttatctgccatcaatgccagtagcctgaccgtgaaagcatttcttgatatgcaggatgataatctgccaaagctggtggtttgccagtctttatccgttatgcagggcgtaacctatgagcagtttgcatggttcgtgcgtcagagcgaagagcagattagcatggtcattcttgaagctaatgcccatcaactgctgttaccgactgatgatgaagggcaaaacaacgttaccgaaaactatttcctccactgataactcctttcgagcacgcagtcgctggtgcagtggctgcgcgctgcaaaattatctgctgtttttaaccttttcttaaagattatttcacttctcttgtgtcgatttggctttatcacatagagcaaatatgcataaaaatttgttaaataccgttttttaatccgagctatagtctcaaaccctggctaaagttattcttgcgatgcttttatatagcgagcagtgctggccgggagaaagttctcttttcttacaccgcgccgataaaaaatatgcacgtttattgcatatctttcagtgtgacaacttttgttcgtttgttaacgaactttcagaaggaaagagatatgaccgccttaaataaaaaatggctaagcggtctggttgcgggtgctctgatggccgtctctgtcggcacgctcgcggctgaacaaaaaacactccacatttataactggtctgattatatcgccccggacacggtggccaattttgaaaaagaaaccggtattaaagtcgtctacgatgttttcgactctaacgaagtactggaaggcaaattaatggccgggagtaccggctttgatctggtggttccatctgccagctttctggagcgccagttgactgcgggagttttccagccgctggacaaaagcaaattgccggagtggaagaatctcgacccggaactgctgaagctggtcgccaaacacgatcccgacaataaatttgctatgccctatatgtgggcgacgaccgggattggctataacgttgataaagttaaagcggtgctgggcgaaaacgcgcccgtcgatagctgggacttgatcctcaaacctgaaaatctggaaaaactgaaaagctgcggtgtctctttcctggatgcgccagaagaagtttttgctaccgtgttgaattatctcggcaaagatcccaacagcactaaagcggatgattacaccggaccggcaacagatctgctgttaaagctgcgcccgaacattcgttatttccatagttctcaatacattaacgacctggcaaacggcgatatttgcgtcgctatcggctgggcaggtgatgtctggcaggcgagtaaccgcgcgaaggaagcgaagaatggcgtgaatgtcagcttcagcattccaaaagaaggggcgatggcgttctttgatgtattcgccatgcctgcggatgccaaaaacaaagacgaagcctatcagttcctgaattacctgctgcgcccggatgtagtagcgcatatttccgaccatgtgttctatgccaacgccaataaagcagccacgccgctggtgagtgcggaagtccgtgagaacccaggtatttatccgcctgcggatgttcgtgcgaagctgttcactctgaaagtgcaggatccgaaaatcgaccgtgtgcgcacccgcgcgtggaccaaagtgaagagcggaaaataatccgcagtcgtagatgccggaggggcgcaccacacccgccggcaattcgcaccattatggtgcgcttgcacacattcaatgccggagagcagccgtgaatgacgctatccctcgcccgcaggcgaaaacccgtaaggcgctgacgccgctattagaaatccgcaacctgaccaaatcctacgatggtcaacatgcggtggatgatgtcagcctgaccatctacaaaggtgaaatcttcgcgctgctgggcgcatccggctgtggcaagtccacgctgctgcgtatgctggcaggtttcgaacaaccttctgccggacagataatgcttgatggcgtcgatttgagtcaggttccgccttacctgcgccccatcaatatgatgtttcagtcttacgcgctgtttccgcatatgaccgtggaacagaacatcgcttttggcctgaaacaggacaaactaccgaaagcggaaattgccagccgggtcaatgagatgctcggcctggtgcatatgcaggagttcgccaaacgcaaaccgcatcagctttccggtggtcagcgacaacgtgtggccctggcccgaagccttgcgaagcgcccgaaactattactgctcgatgagccgatgggcgcgctggataaaaagctgcgtgacaggatgcagcttgaagtggtggatattctggagcgcgtcggtgtgacttgtgtgatggtcacccacgatcaggaagaggcgatgaccatggcggggcgcatcgccattatgaatcgtgggaaatttgtccagattggcgaaccggaagagatctacgagcatccgactacccgctatagcgccgaatttattggcagcgtaaacgtctttgaaggcgtactcaaagagcgtcaggaagatggcctggtgcttgatagcccggggctggtgcatccactgaaagtcgacgcggatgccagcgtggtcgataacgtgccggtacatgtggcgctgcgcccggaaaaaatcatgctttgcgaagagccgcccgccaatggttgtaacttcgcggtgggggaggtgatacacattgcctatctcggcgatcttagcgtgcatcacgttcgtctgaaaagtgggcagatgattagcgcccagctacaaaacgcccatcgtcatcgtaaagggttaccgacctggggcgacgaagtgcgtttgtgctgggaagtggacagctgtgtggtgctgacggtttaaggagcaaagatgagtacacttgaacctgctgcccagagcaaaccgccgggcggatttaagctgtggttgagccagctgcaaatgaagcatgggcgcaaactggtcattgcgttgccatatatctggttgatcttgctgtttctgctgccatttctgattgtctttaaaataagcctggcggagatggcgcgcgctattccaccttataccgaactgatggagtgggctgacgggcaactgtccatcactcttaatctcggtaattttctgcaactgaccgacgatccgctctatttcgatgcttatctccagagcctacaggtggctgcgattagcacattttgctgtttactgatcggctatccgctggcgtgggcggtggcgcacagtaagcctagcacccgtaatattttattactactggtgatcctgccgagctggaccagctttctgatccgcgtttatgcctggatgggaatattaaaaaacaacggtgtgctgaataattttctgctgtggctgggggttatcgatcaaccgctgaccattctgcataccaatctggccgtttatatcggcattgtttacgcttacgtgccgtttatggtactgccgatttataccgcgttgattcgtattgattatagcctggtggaagcagcgctggatctcggtgcacgaccgctgaaaacgttctttactgtgatcgtgccgctgactaaaggtgggattattgccggaagcatgctggtgtttatcccggctgtgggcgagtttgtgatcccggaactgctcggtggcccggacagcatcatgatcgggcgcgtgctatggcaagagtttttcaataaccgcgactggccggtggccagcgcggtagcgatcatcatgttgctgctgctaattgtgccgataatgtggttccacaaacaccagcaaaaaagcgtgggagaacacggatgaataatttaccggtagttcgtagcccctggcggattgtgattttgctgctgggctttacctttctctacgcgccaatgctgatgctggttatctatagctttaacagcagcaagctggtgacggtgtgggccggctggagtacgcgctggtatggtgagttattgcgcgatgacgcgatgatgagtgcggttggtttaagtctgacaattgcggcctgtgcggcgacggcggcggcgatcctcggaactattgcggcggtggtgctggtgcgctttggcaggtttcgcggaagtaatggctttgcctttatgatcaccgcgccgctggtaatgccagatgtcatcacgggcttgagcctgttgttattattcgtcgcgcttgctcatgccattggctggcctgcggaccgcggtatgctcaccatctggctggcgcatgtcactttttgtacggcttatgtggcggtcgttatttctagtagattgcgggaactggatcgcagcatagaagaagcagcgatggatctcggtgcgacgccgctgaaagtgtttttcgtcattacgctaccgatgatcatgcccgcgatcatttctggctggttactggcttttactttgagccttgatgatctggtgatcgccagctttgtttccgggccgggagccaccacgttaccgatgctggtcttttccagcgtgcggatgggggtgaatccggaaatcaacgccctggcaacattgatcctcggcgcggtcggaattgtcggatttatcgcctggtatctgatggctcgcgcagaaaaacagcggatacgcgacatccagcgtgcaagacgtggctgaagacactaaaatttgccaacctggctacataatgccgcgcatgtcgcggcattgttttcatggaagacgaaacgttgggattttttaagaaaacatctagttctcatgctcgcctgaatgtgcctgcgctggtgcaggtggcggcgctcgccattattatgatccgtggcctcgacgtgctgatgattttcaatacgctgggcgtgcgcggtattggcgagttcattcatcgcagcgtacaaacctggagtttaacgctggtctttttaagcagtctggtgctggttttcattgagatctggtgtgcgtttagtctggtgaaagggcgtcgctgggcgcgctggctatatctgctgacacaaatcaccgccgcaagttacttgtgggcggctagcctggggtacggttatccggagctgttcagcattcccggtgaaagtaaacgtgaaatcttccatagcctgatgctgcagaagctgccggatatgctcatcctgatgctgctgttcgttcccagcaccagtcggcggttcttccagttgcaataatgtgtataatcgtcgcccctgatgatgtgaaggtcaatgtatgcagtgcgcactttacgacgcgggtcgctgtcgttcctgtcagtggataatgcagccgattccagagcaactctccgctaaaaccgccgatcttaaaaatctgctcgccgactttccggttgaggaatggtgcgcgccggtgagtggcccggaacaagggtttcgtaataaagccaaaatggtggtgagtggtagcgttgaaaaaccactgctcggtatgctgcatcgcgatggcacaccagaagacctttgtgactgcccgctttatcctgccagttttgcgcccgtttttgcggcgctaaaaccgtttatcgcccgagcggggttaacgccctacaacgtggcgcgtaagcgtggcgaactgaaatacattctgctgactgaaagccagagtgatggaggcatgatgctgcgctttgtactgcgttctgataccaagctggcgcaactgcgtaaggcgctgccgtggttacacgaacaactaccgcagctgaaagttattaccgtcaatattcagccggtacatatggcgattatggaaggggagacggagatctacctgaccgaacaacaggcactggcggagcgttttaatgacgtaccgctgtggatccgtccgcaaagtttcttccagactaatccggcggtcgccagccagttgtacgccaccgcgcgcgactgggtacgacagctgccggttaaacatatgtgggatctgttctgcggtgtggggggctttggtttacactgcgcgacgcctgacatgcagttaaccgggatcgaaattgcaagtgaggccattgcctgtgcaaagcagagtgccgctgaactgggcttaacgcgtttgcaatttcaggcgctggactccactcagtttgccaccgctcagggggatgtgccggagctggtgctggttaacccgccgcgccgcggcattggtaaaccgctgtgtgattatctcagtacgatggcaccgcgttttatcatctactccagctgtaacgcccaaactatggcgaaagatatccgcgaactgcctgggtttcgtattgaacgggtgcagcttttcgatatgttcccgcataccgcgcactatgaagtgctgacgctgctggtgaagcaataaaaaagccgcatgtgcggcttcagattgctgacaaagtgcgcgttgtttatgccggatgcggcgtaaacgccttatccggcctacaaaagcgtgcaaattcaatacattgcatgggccatgtaggcctgataagcgtagcgcatcaggcaattttacctttgtcatcagtctcaagccgcggttgcggctttctgaatcttactgtgggaaccactggtcactgattttttgataagtaccgtcagctttaattgctgccagcgcgttattcagtttttccagcagggctttgttatccggacgtacagcgatgcccaggccggtgccaaaatattgcggatcggtcactttctcagtagcaacaccaagttgtggattggttttcagccattcgtttaccaccgctgtgtcaccaaataccccatcaatacgaccatttttcagatcgataaaggcattctgataactgtcataagagacagttttcacttccgggtgctgatcctgaatatatttctggtgcgtagtaccgttttccatcccaatacgtttgcctttcagatcggcaaacgttttgtaggtatcttttttggcaatcacgacggcactgttttcatagtagggcgtggtaaagcttacctgtttgctacgctccggggtgatatccataccggagattacggcgtcatattttctgaatttcagggacgggatcaggctgtcgaacgcgtgattagtaaaagtacattctgcctgcatttgtttgcacaaggcttttgccagatcgatatcaaagccgacaatctcattattagcacctatagattcaaagggtggataggtggcactaacgccaaaattgattttctctgcggcagaagcaccgaaagtaaaggaagcaagtaaagcggcaagaactaactttttcatgatggaactcccgtctgtcaatcttatgatttttggccgtgtctgcggcatgggataacaatgccatcaagtgaatttatatgcaataaacatgattaaataatttaaatgaaataaaaaagacggacaacttagtgggttgtccgtcttcattataagaatttatgcactatgtaggccggataaggcgtccccgccgcatccggcacaggcaccgtgctgatgtctgatgcgacgctggcgcgtcttatcagacctacaaaaccccccggcgaatgtacgcagccacattaatttcgccgttcgaatgccagcgctttgcgctcgatcagacgcatcatcagcgtcagcaggccgttaacgaccaggtaaataatccctgccgcaccgaacaccattacatcgtaggtgcgtccgtacaacaactggctgtatcccatcacttccatcagcgtaatggtgtatgccagagaggtacttttgaataccagcaccacttcgttggaataagaagagaggctgcgtttaaaggcatacggcagcaggatcgccagcgtatcttttttgctcattcccagggcgctacaggactgccactgaccttccgggatcgcacgaattgcaccgtaaaacagctgcgtggtatacgccgcactattcaggctcaacgcaatcagcgcacataaccacggttcactcaacaaatgccacagtgccggatactcctgcaaagtcggaaactggcccggcccgtaataaatcaggaagatctgcaccagcagcggcgtaccggtaaacagcgtgatataaccccgcaccagccacaccagcaccggcgttttcagcgtcaggatgatggtaaaaatcaatgccagaatcagtgccacaatcaggctggcaacggttagcgtcaggctggtgtgtagccctttcatcagttcgggtaaatactcaaacattagctgggcctccgctcaaaacgtgtcgcgcgcaggtcaatgcgtttgagaatgtactgactgagcagggtgatcaccaggtaaatcgccgccgccacaatgtaccaggtaaatggttcctgggtacgagtagcgatgctttttgtttgcagcattaaatcattcacactaatcaaactgaccagcgcggtatctttcagcagcaccagccactggttaccgaggccaggcagcgcatgacgccacatctgcggcatcaccagacggaaaaagatagcgcttttgctcagccccagcgcctgaccagactcccactgacccaccggcaccgctttcaacgcgccccgaagcgtttggctggcataggcggcatacagcagactcagagcgatgacaccacaaaggaacgggctaacgtcgaagttctcaatgtccatctgcactgggatctgcacgaacccaagattgatagtgaagccatcgctaagcgtcagcagcagctggctggagccaaaatagataaacagcaccaccagaatttctggcaggccacgcagaatggttaccagcgcactacctgcccacgcgacaggacgccattttgcgctctcccataccgcaaagaacatcgccagcgccagcccgacaatcaatgcacaaacggcaaggccgacggtcatcccggcggcgcttgctaaaggaaaaaattcattcatcaggaattacttctggaaccatttgttgtagatggtttcgtaagtgccatctttcttcactttttccagcgcagtgttgagtttctgctgcagctcagtgttgccctgacgtaccgcgatgccgaggccagtgccgaagtaatctttatcggtcactttgtcgcccaccgccgccagtttcgggttatctttcagccactcagtgaccactgcggtgtcaccgaagacgccgtcgatacgcccgttttgcagatccagttttgcgttctggtagctgtcatacggaacggtagtgatttccgggtgcttatccataatgaatttctggtgtgtcgtcccgttctgtacgccgacttttttgcctttcagctgatcaacactggtgtatttgccttgctgacccacaaacagggcagagttgtcatagtacggggtggtaaacagcacctgcttttcacgctccggagtgatatccatgcccgccatcacggcttctacgcgacggaatttcaggcttgggatcaggctgtcaaacgcctggttagagaaagtgcaggttgcatcaatctctttacacagcgcttgtgccaggtcgacgtcaaaaccaacgatctggttgtttgcatcaatgctttcaaacggaggataggaggcttcggtagcaaaacgaatggtttcggcagctgtggcggaaagactaaaacctgcaattaacgcggcaatcagaacttttttcattgttgttatcccgaatcttagtgagagagatagtttttaaatgcttcggtttgcggctcggtaaagcagctcgcgtcgccttgttctacgatatgaccattttccatatacaccactcggctggcggttttacgcgccacttcaacttcgtgggtgacgatcacctgggtaatattcgtttctgccagctcacgaatgatgctgacgatttgtgccgtaatttccgggtccagtgcggcggtcggttcatcgaacagcagtacctgcggttccatcatcaacgcacgggcaatagcaacacgctgctgctgaccaccagaaagatgcagcgggtaacgatcgctataaggtttgagacgcagacgttccagcagtttttctgcacgggccagcgcctgatctttactcaaccccagtacacggcagggcgcttcaatcaggttttgctgcacggtcagatgcggccacaggttgtattgctgaaacaccatgccaacgttacgacgcaaatcgcgaatcgctttgtcagagggtgttttggtgaaatcgaaatggttgcctgcaatgttgagcgtaccggagcgcggcatctcaagcagattgagtacacgcagcaggctgcttttacccgcgccgctggggccaagtaacaccagcgtttcgccctgtgggcaatccagcgtgatatcgaacagcgcctgatgcgcgccgtagaagcaattaatgccgtttaattgaatactcattgacactcgtatactggcagtctgatagctattgaggtcgaagatagtacctttgacagaataattatgcaatatttctgctttaaaagttaaaagcaaagcgcattattcaataaacatagcacaaaataacgggggcggtggtcggcgagcataaatgtcggcattcctcacgaaatgccggacaatttacggggtttattggttgatcaaggcgttagcgattctcgatggactgacggagcgtacccgccgtggcatgaacgctaccgcctaagtaacgcacatcgtcgatgacccaacactggccttcctgaatcattaacacttcatcctgccaaccctggtcaccctgtttgagatccacgcgcaatggaatgttacgggcatcacgattagggatagtgcttgcactggcaacgtgggcgctatctggcaaggtggttcgactggagaatggatcgttggtcagtagttcccgatggttattatcccgggaggcatcgctaagcagtgtcgccagtttgtcgctcagataagggcgcaaggcggtgatgtcgttgctgcggtgcaaaatgcggtagtcataaaattgctgggccacgttatccgggcctccttcaacgcaaggaccactgcgtgtgccgttatctttataagctggagtgactgtggtgcaggcactgaggagcagtgcgcaggggataagcattgtcaatttgctgtagcgcataatgatttccttataagcgatcgctctgaaagcgttctacgataataatgatatcctttcaataatagcgtatcagtctgataatgcttttgagatcgaaggcttagcaaacaaggagatcgatcatgcaattttctacaaccccaactctggaaggccagaccatcgttgaatattgcggtgtggtgaccggcgaagcgattttaggtgccaatattttccgtgatttctttgccggtatccgcgatatcgttggcggacgttccggtgcgtatgaaaaagaactgcgtaaagcacgggagatcgcctttgaggaattaggctcccaggcgcgggcgctgggggccgatgccgtcgtcggtattgatatcgactacgaaacggtcgggcaaaacggcagtatgctgatggttagcgtcagcggtacggcggtgaaaacgcgtcgatgagaagattcttctggctggtcgctgccgctctgttattggcagggtgtgcaggcgaaaaaggcattgtcgagaaagagggatatcagcttgatacccgacgccaggcgcaggcggcgtatccgcgcattaaagtgctggtgatccactacaccgcagatgattttgatagcagcctggcgacactgaccgataagcaggtcagcagccattatctggtccctgcggtaccaccgcgatacaacggtaaaccgcgcatctggcaactggtgccggaacaagaactggcctggcatgcggggattagcgcctggcgcggggcaacgcgccttaacgacacctctattggcattgagctggaaaaccgtggctggcaaaaaagcgccggagtgaaatattttgccccgtttgaaccggcacagattcaggcgcttattccactggcgaaagatattattgcccgttatcacatcaagccggaaaacgtagtggcacatgcggatatcgcaccgcagcgcaaagacgatccggggccattatttccctggcagcaactggcgcagcaggggattggtgcctggccggatgcgcagcgggttaacttttaccttgccgggcgcgcgccgcacacaccggtagataccgcgagtttgctggagcttttggcgcgctacggttatgacgttaaacctgatatgacaccgcgcgagcagcggcgcgtgattatggcattccagatgcatttccgcccgacgttatataacggcgaagcggatgcagaaactcaggcgattgccgaagcattgctggagaaatacgggcaggattaacgcggcagttttccgtggtcgcgtagccaggcggcagttttctcgataccttcatccagggtgatgaccggctgataacctaactcttcctgcgcacgcgtaatatccagcgtaaagtcaaaattcaacttggagacgccgtagtgggtcagcggcggctcttttgcactcttgcggcctaaacgctccatgctgcgggcgatcatatccagcatcgggtaggggacggaacgaatacgacagtcaatattcaactcgtcgatcagcttctgcacgatgctgcgcagtgtgcgatgctcgccgttggtgatgttgtacacacgcccggaaggtagcttatcgcaggcttcctggcttgccagccacattgcgtgcacggcattttcatagtaggtcatatcgaccagcgcactgccgccatgcggtaacagaatactgccgtagtggtgcatcatatgcgccagacggggaataaagactttatcgtgcggtccgaacagactttgtgggcgcagaatagtaaagcgcgtttgtggattcgcctggctaagcatattgatcacttcttcgctggctgctttgctgcgggcaaactcgttggcgaagcggtgagggcgaaaatcttctttaatatcgcgatggtggtgataatcgaagtacagggagggggaagagatatgaataaagttacgcacaccccaggcgacagcccattcacccaggcggcgagtggcgcgaacgttagccagatcgaaagcctgttgtgtcccccagggactggtaaagctggagcagtgccacagcgtatcaatgcccgcgagcatcactttagcttgactactaaccagctcggtcagatccgccggaacaaactctgcgcccattttttccagcaatttgcccattgcctcgttgcgaccggtcgctcgcacgctgatgcctttctggcataaaaactctaccgcgtttcgacctaagccgctggtggcgccggtaaccagtaccttcatatcaatccactgttgttgagaaaataacgtgcgcattcttccgtgatttcccccatgatgcaatgggaaacatgaaagaataacgcaggttttgtcgattaatctgtgctttgttctgccagtctggcgatttgttttgccattccgcgaaaaataaacagatgcgcggggatcatcaataaccagtaaaacagccccggcataccgtgcggatgccagaaagcgcggacatcgatagtacgatagtcgcctttatcttccaggctaaaacacagtcgtcccagccccggcgctttcatgccaaataacaacgtaagttgtttttccggttcaacgacaatcactttccagctatccaccgcatcgccagtctgtaaatattcgcgctccgggcggcctttcgccagcttatgaccgatcgcgcggtccatcaacgcccgtgtctgccacaaaatattgccaaagaaataacgctctttaccgccgatttggttcactacctgccataaagcagcaaggctggcggacgttttaacggtaaaccccgcctgtttggcaaaataaccgtactccggtcgccagcgggcaaaggcctgagcgtcgtagccccagtcgctggagttgaccagtttttcctcctctttcaacgtgctacgtaccgcgtcatcgaaagcgatcagccgttgtgggatgagtgcacgtagcgcggtatcatccgccagcagatcgtgtttcagcccctgaatcaacgccctggcggtggtgggcggtacggaagtaatcacattgagaaaccacacgctaatccagcgggtggggagggggatggggatcaaccagcggcgcttaccgctcaccgccataaaatgttcaaactgttgctgataactgagcacctctggtccggcggcttcgaagatgcggtgttcgctggccggatgatctaacaacgcaaccagatagtgcagcaagttttccagcgcaatgggcgtggtgcgactacgaacccagcgcggaggcgttaagactggcaggttgtagaccatatcgcgcatgacttcgaacgccgcggaacctgcgccaacgataattccggcccgcagttcggtcacgggtacattcgcttcacgcagaatgtccgccgtagcctgacgagcacgcagatgatcgctctgctcatgtggcggggcctgcaagctactaagaaagattaattgcttaactggtacttcacgtagcgcatcgcggacgttgagagccacctggcgctcctgagcgataaaatcgccgccttcgcccatgctgtgcaccagaaaatagaccgtatcgatatcctgcaacagggccggtaggttatccggccagctgagatcgactttatggcaactgacgtttgccagttgcagctttgcaagcctgtcgacatgacgtgccgccgccaggatctgatgcccttgctggctgagtgtgcgcaccagatgctgaccaatgtagccactggcaccgagaactaaaatgcgttgcggcacgtctctctccttaacgcgccaggaatgcacgccagtgggcggcgacttccgccagttgttcgcggctgacgtcaagatgcgtcaccaggcggacaatcgggctggcgttaatcagcacgtttctcgctttcatgtattcgcctaacgcggcagcattttcttccccgacgcgaacaaacagcatattggtgtcctgacgcatcacatccgcgcctgcttcacgcagctgctccgccatccaggcagcgttgtcgtggtcttcctgcaagcgcgcaacgttatttttcagggcatatatcccggcggcagccagaatgccggactggcgcatcccgccacctgtcattttccgccagcgaatggcacgtttaatgtaatcacgattaccgacgagtaaactaccgactggcgtcccaagacctttgctcaggcaaatggtgaagctatcacaatattgcgtgatctctttcagttcgcagccgtaagccaccacggcattaaagatgcgcgcaccgtcaacatgcagcgccagattgcgctcgcgggtaaattcccatgcttctttcaggtattcccgcggcaacactttgccgttgtgggtgttttccagactgagtaatttggtgcgggcgaaatggatatcgtcgggtttgattttcatcgccactttatccagcggtagcgtgccgtcggcagccgcgtctatgggttgcggttgaatactgcccagcaccgccgcgccaccggcttcaaacagatagttatgcgcggcctgaccgacaatatactcttcgccgcgttcgcagtgactgagcagagcgaccaggttggcctgagtgccggtaggcagaaaaatggcggcttctttaccggaaagctctgctgcgtagtcctgcagagcattaacggtagggtcgtctccgtaaacgtcgtccccaaccggggcggccatcatcgcttcgagcatggcgcggcttggtcgggtaacggtatcactgcgtaaatcaatcatggcatgtccttattatgacgggaaatgccaccctttttaccttagccagtttgttttcgccagttcgatcacttcatcaccgcgtccgctgatgattgcgcgcagcatatacaggctgaaacctttggcctgttcgagtttgatctgcggtggaatggctaactcttctttggcgaccaccacatccaccaacaccggaccgtcgatggagaaggcgcgttgcagggcttcatcaacttcagacgctttttctacacggatacccgtaatgccgcacgcttcggcaatgcgggcaaagtttgtgtcgtgtagttcggtgccgtcagtcaaatagccaccagctttcatctccatcgccacaaagcccagcacgctgttgttaaagacgacaattttcactggcagtttcatctgcactacactgaggaaatcgcccatcaacatgctaaaaccgccatcgccgcacatggcgaccacctgacgttctggctctgtcgcctgcgcacccagcgcctgcggcatggcgttagccatgctaccgtggttaaagctacctaacaggcgacgcttgccgttcatttttagataacgtgccgcccacaccgttggcgtaccaacgtcacaggtgaaaatagcgtcatcggcggcaaaatgactaatttgctgcgccagatattgcgggtgaatggctttctcgctcggtttagctaaatcgtccagccctttgcgggcgtcgcggtaatcttccagcgctttatccagaaacttgcgatcggctttttcttccaccaatggaagcaatgcacgcagagtgctcttgatatcgccgaccagtgccatatccaccttgctgtgagcgccgatgctggctgggttgatatcaatctgaatgattttggcatcggtcgggtagaaggcgcggtagggaaattgcgtgccgagtagcactaacgtgtcggcgttcatcatggtatggaaaccactgctgaagccgattaacccggtcattccaacatcatacggattatcgtattcgacatgttctttaccgcgcagggcatgaacaataggcgctttaattttcccggcaaactcaactaactctttatgcgcccccgcgcagccgctgccacacatcagggcgatattgctggaataacgcagcagttgcgccagtttgcgtaactcttcttcttccggcgtcacgactggttgtggcgcatgataccagtgcatggttgccccttctggcgcaggttttaacgccacgtcgcctggtaacacgacaacgctaacgccacggttaagcaccgctttgcgcatggcaatcgccagtacttgtgggatctgctccgggctggaaaccagctcgcaatagtgactacattcgcggaatagctcttgtgggtgggtttcctggaaatagccgctgccaatttcgctggagggaatatgagcggcaatcgccagtaccggaacgtgattgcggtggcaatcgaacaggccgttgattaagtgcaggttgccggggccgcagcttccggcgcagaccgccagttctccgctaagttgtgcttcagcgccagcggcaaaggccgccacttcttcgtggcgggtggacatccactcgatggtgcccatgcgattaagactgtcactaagaccgttcagagagtcgcctgtgactccccagatgcgtttcacccctgcgctttcgagtgttttggcgatataagctgcaaccgtttgtttcatggttctccatctcctgaatgtgataacggtaacaagtttagttcatctgacggagggggaagggatgggagagaaaggaggcactaacggttaaatagcccgatgaaaggaatatcatcgggcataaggcgattatgcgagaaccaaatccccctgcggatggcaggagcaggccagtacgtaaccttcagcgatttcggcgtcggtcagcgtcattgtgctgctcaccgtatattcaccggaaaccacttttgtcttacagcagccgcaaacacccgcacggcaggcagcgacaaccggaacgttattgctttccagcgcctccagtagcgtggtgccaaccggggcgtaaaattctcgtgccggttgcagtttggtgaatttcagaccgctggtcgccgcttctgctactggggtgaagaatttctctttaaagaaacgcgtcacgccgagcgctttcacttcctgctctacccaatccatatacggagccgggccgcaggtcatcacggtacgactagctaagtcaggtacacctgccagcagttcgcgagtgagacgaccagcgataaagccttcggtaacgttattttctgccaccagcgttaccggatagttacgccactcatcggcgaaaataacatcctgcggcgtacgcacgttgtagatcacccgcacatcggcctgtggacggttcttcgcaagccagcgacgcatgctcataatcggcgtgacgccgcagcctgccgccagcaacaggaatttatcttctgctttatcgtcgcaggtaaattcccccatcgcgtcgctaagccagagataatcaccgcgttttacatcgcgcgtcagccactgggagccgacaccgtcatcaatccgccgcacggtcagggtgatatattcactcacgcctggcgtggaggaaatggtgtaagcacgcagcgtttccgcactgtttcgcacgctgaccagtgcatattgcccggcgcgatatgggtagtaatcgtggcaaatcagggaaatcgtccacacatccggcgtttcttgcgtaatgtgatgaacctgcatccgccacgggcattgattcgttggcatcgtcatcgacaaactccttacgcgctcaacagttgcttcatgtcttcttcaacagtggtgatagaacgcaggccgaatttctcgttcagcaccgccagcaggtctggtgtcaggaaaccaggtgcagtcgggccggtgacgatatttttcacgcccagagaaagcagcgtcagcagaatgacgatcgctttctgttcaaaccaggagagcaccaggctcagcggcagatcgttgacaccgcagcccagtttctctgccagagtgacagccagaataatcgcactgtaagcatcgttacattgacctgcatctaccagacgcggcagaccttcgatatcgccaaactcaagtttgttaaagcgatatttaccacaggcgagggtcaggatcaggcagtcatccggcacgctggtggcgaaatcggtgaagtagtggcgctcgccgcgtgcgccgtcacagccaccaagcaggaagatatgacgcagtttttcacggctcaccagatcaatcagcgtatcagcagcgccaagcagcgtctggcgaccaaaacccacggtgataaggtgcggaatttcgctgtacgggaagcctgccatctgttgcgcctgggtgataaccgcagagaaatcatcaccgtccagatgacgcacgccaggccagccaacaatgctgcgggtccagatacgatcgtcataagcgcctacggttgggtcgatgatgcagttgctggtcatcacgatggggccagggaaacgagcgaactccacttgctgattctgccagccgctgccgtagttaccgaccagatgcttgaatttacgcagctccgggtagccatgcgcaggcagcatttcgccgtgggtgtagacattaacgcccgtgccttcggtctgttccagcaggttgtagagatctttgagatcgtgaccggaaatcagaatgcatttacccgccgtcgctttgacgttgacctgggttggcgtcgggtgaccgtatttaccggtttcgcctgcatccagaatgctcatcactttgaagttcatctggccgatttccatactacactcaagaagcgcgttcatatcggcaggccaggtccccagccacgccatgattttatggtactgggcataaatatcgttgtcgtattgaccgagaacatgcgcgtgttccatataggccgccgcacctttcaggccatacaggcacagcagacgcaggccgagaatgttttcgccaatcgccgctttatctttgttaggggtaaattctgctgcctgacgttgcagctcgccgagatcgtcgctcaccagttgcaggtcagccatcgggttatcgacgcgcgcgttggcatctacagccaggcattgcgctttcagcgcctcgcgcagggcaatcgcttcacgagcgtagccgacaatacgcggagaatcgaagttaacgttggtcagggtactgaaaaaggcacgtggcgcgaagctgtcaacatcgtggttgatgatgccgtattcacgcgcttttaccgcccaggcagaaagcccttgcagcgccgcgatgagtaaatcctgaaggtcagaagtttccgccgttttaccacacatcccctgcgcgtaactgcagccgtttcctgccggagtacggatagtttgttcacattgcacacaaaacatgatcacaccttttaaagttatatttaatatacatgtttaaggttaagacgcttaacgcggggataaaagggatttttcatgcaactttaagggagattgatttagcgcaattttggcggcagggatctaccgccagagaggtattacgcagagaaaaaggcgatgaggatcggcactaacaggctaagaataaaaccgtgaacaattgccgccgggaccatatccagcccgccagtacgttgaagaacgggcagggtgaaatccatacttgtggcaccgcataagcccagtgcagtagagcggctgcggcgaatcagcccagggatcaacataatagcaatcagttcacgggccagatcattaaaaaacgccgcgctcccgattaccggaccaaaagattcggtcaataaaataccggaaagagaataccagccgaaaccggaggccattgccagcgcggtattgatggggagatcaagaataaaggcgttaattaaaccaccaattaaactactgacaaccaccaccacggcgacaatcattccccggcgattaaggacaatctgctttaaggtcatgccattattgcgcaactgaataccaacgaggaaaagtagcaaaattaacgtgtattcactggcttcggtcgcgtgttgtaagaaagccagtccacttagaccaatggcaaaaccaatcactactacgccgcacagttttaggctctccagcgccatcgcaatacggctcgggagtttttcttgctgatggtggttgcgccacggcaggcctcgctccagccacatcagggcggcaatattacacagtaaaataacggtaatactgacggcagaataatgcagaatcgccaacaggttactggcgaggttatcgagaaacgccagactgatacccataaaaaagagaataaggtaaaccatccagcttaatagctgattaataacttttaacgcagcttgttggcgaagcggaatgaggtaacccacaatcaggggaaccagaatgattaacagcccagaaaacatgaaaacccagtccttgcaaagatgaagtcgaaatgcgcgatgacacactactgaaagcggaaggacgagtaaagttgcaattaaaaggaaatgttatgcataaggagcagtagagtattcgttttcatttaaagatattcttgcgctttaattacaaactgcaccgatgttggtggcgtcaaaatcgccgaggcgttccctgaaggccggggcagcccacatggatgtgggctgagggcgcgttttacagggatgttacctcgcgcccgacccggtagccgtaagggataagtcgagggcaccgcgcagcggcgattttgttcgccagagcccgggggtgcagggggcggcggcgattggccgccccctgcgcgctccttgcgccagtggcaatatgttgcttagctcatgaaaggagcgcaacaagatgatgaatcaacatataacaacatcttaaaaaaaggcctgacattacgccaggccttctgcgttaattaatcacgcttttccagcagggtccggtaaatcagaccaccgataatgccgccgacaattggcaccacccagaagaaccacagttgttctaatgcccagccgccctggaagatagcaaccgcggtgctgcgcgccgggttaacagaagtgttagtcaccggaatactaattaagtgaatcagggttaaggccagaccaatagcgatcggcgcaaaacctgccggcgcgaatttgtcggttgcgccgtggatcaccaacaggaaacctgcactcaataccagttcaactaccagcgcggaaagcatggaataaccgcctggactatgctcgccataaccgttagaagcaaaaccgctggctgccgcgtcaaaacccgttttaccactggcaattaaatacagcagcgccgctgcaacaataccgccgacaacctgggcaattacgtagccaacgacttcttttgccggaaaacgtccgccagcccataaaccaatagtgaccgccgggttaaaatgaccaccagaaatatgaccaacagcaaaggccatcgtcagaacggtcagaccgaacgccaacgccacgccggcaaaaccaatgcctaattccgggaagcctgcggccagtacagcactaccacagccaccaaaaacaagccagaaagtaccaaaacattcagctgctaattttctgaacatatccaccacaattaaaaattgaccctgtgaaaaatatggtcgttttatagggtcgtcgtaaaaaagtgacgacggaaataatgcgcggctattttaaaaacgaaggcgagtcattcaccagataaataaatccagtaaatttgatttagggcaacagcgggttgccccatatagtcatttgtctgattgacagtgtagtgcacgcaaaagatttaatcctttaggcgtaataaaaaataatttatcatgctaattatttgattttgttgtttttgcagacttatcagcaagagggagtataacgcgattattcgctcatttttcagacatttgccatgcttaaatgtgatgtcatcacgtattagcaaggcctttcccgttatactgccagcgtaaaggataagtcacatatttctggaggggatatgattcttgagcgcgttgaaattgtgggttttcgcggtatcaaccgtttgagcttgatgctggaacaaaacaacgtcctgattggggagaacgcgtggggtaaatccagcttgctggacgccttaactctgctgctaagcccagaaagtgatctctaccattttgagcgcgacgatttctggttcccgccgggagatatcaacgggcgagaacatcatctgcatattattttgaccttccgcgaaagcctgccaggccgacatcgggttcgccgttatcggccgctggaagcgtgctggacgccatgcaccgatggctatcaccgtattttttatcgtctggaaggggagagtgcggaagacggcagcgtgatgacactgcgcagttttctcgataaagacggacatccgattgatgtcgaggatattaacgatcaggcacgccatctggtgcgtttaatgccggtgctgcgcttgcgtgatgcccgttttatgcgccgtattcgtaacggcacggtgccaaatgtccctaatgtggaagtcaccgcgcgccagctcgatttcctcgcccgtgagttatccagtcatccgcaaaatctctctgatgggcagattcgtcagggactttccgcaatggtacagctgcttgagcattatttctctgagcagggggccggacaggcgcgatatcgtttaatgcggcggcgagccagcaatgagcaacgaagctggcgctatctggatatcatcaaccggatgattgaccgacctggtgggcgcagctatcgggttattttgctcggcctatttgctactttgttgcaggcaaaaggcacattgcgactggataaagacgcccgtccattgttgctgatcgaagatccagaaacccgtttacaccccattatgcttagtgttgcctggcatctgttgaatcttctgccattgcagcgcattgccaccaccaacagcggtgagttgcttagcttaacgccggtagagcatgtttgccgactggtacgtgagtccagccgcgttgccgcctggcgtctggggccgagtggcttgagtaccgaagatagccgacgcatatcctttcacattcgttttaaccgtccgagtagcctgtttgcacgctgctggttgctggtggaaggggaaacggaaacctgggttatcaatgaactggcgcgtcagtgcggacatcattttgatgccgaagggatcaaggtcattgagtttgcccagtccgggctaaagccactggttaaatttgcccgccgaatggggattgaatggcatgtactggtcgatggcgatgaagcagggaagaaatatgccgctacggtacgcagcctgttgaataacgatcgggaagccgaacgagaacatttaacggcgttaccggcgctggatatggaacattttatgtatcgccagggattttccgatgtgttccaccgcatggcgcaaatcccggaaaatgtaccgatgaatctacgcaaaattatcagcaaagcgatccatcgctcttccaaacccgatcttgccattgaagtggcaatggaggcaggacgtcgtggtgtggactccgtaccgacgctgctgaaaaaaatgttcagtcgcgtgctgtggctggcgcgcggtcgcgcggattaaccgcgaaacatcgtggccatttgtggctgaatagcgtcgagcatctcatagcgccgacggtattcagcccgttttttactggcgatttcggcaatctcttttcgtgctatctgtgctggaaggcggtaatggcgttcagcatcacatacgccgccaacgctttcccagaaagcgttgtaatcagcgtggatcttgccttctttatcgcgataacgcaggctgcggtaaatatgcgtttcattgctgacggcaataatctgctctacctgcaaacgttgggcaaacagacaggccgcttccatcacgaggcgtttgggaaatagcccgtggcaggctttcgtcgcattctggatttcctgatgtggaatttcccattttgcgccttgcagtccgccaataaacatcgttcttttcccctgatattcacacagggtaaacgtgatctctgccagaggaataccttcgctgttgcggaacaggattgtgctgtcaccttctttatccatactgatcatcatggtcagctcaagcgtgaactgctcgccgtttttgccttccagcttcgccagttgcagcccgggggtattcaaatataagctgaattcttccgcgctcatacattcgcggagtaacgcataatggtaacgtaacgcctccagcaattgcttacggctaagattcgccgcaaggtaagggcgatgcagacgcacaggcagtcgcggctggcgcgttaacaatacattgagattaggccagtgggaaagttcgttcatccactcaacgcttaaacgcggcataatcaagctgcgcagcaaaaatttctggcgaaaactacggcgatgccagaatttacccggccgacactgtccacgtgccagactaagaaaaagactcaggctgctgagagattcagatggcgtaaaggtccgttcagttagctggctcatattcatgaaatcaatggttatacatggcgtgcttttcaccattgcgtatcttaaccaaacatcaatagtgtgattactaacgtaaattttagggttttgttgatatttcgttgaagttaatgacccggattggcatatggagtattcagaaaatttatgaaaaagcggaaaaccgtgaagaagcgttacgttattgcgctggtgatagtcatcgccggactgattacgttatggagaattcttaacgcacccgtgccgacttatcagacgctgattgtgcgccccggtgatttacagcaaagcgtgctggcgaccggaaagctggacgcgctgcgtaaggttgatgtgggcgcgcaggtcagcggtcagttgaaaactctgagcgtggcgattggcgataaagtaaaaaaagaccagcttttaggggttattgatcctgaacaggctgaaaaccagattaaggaggtcgaagcaacgctgatggagctacgtgcgcagcggcagcaggcggaagcggagctgaaactggcgcgggtgacgtattcccgtcagcaacgtctggcacaaacgaaggctgttagtcagcaggatctcgacaccgccgcgacggagatggctgtgaaacaggcgcaaattggcaccattgacgcgcaaatcaagcgcaatcaggcttctctcgatacggctaaaaccaatctcgattacactcgcatcgttgccccgatggccggggaagtcacgcaaatcaccactctgcaaggccagacggtgattgccgcacaacaagcaccgaacattctgacgctggcagatatgagcgccatgctggtaaaagcgcaggtttctgaagcggatgtaatccacctgaagccggggcaaaaagcctggtttacggtgcttggcgatccactgacgcgctacgaggggcaaatcaaggatgtactaccgacgccggaaaaggttaacgacgctattttctattacgcccgttttgaagtccccaaccccaatggtttgctgcggctggatatgactgcgcaagtgcatattcagctcaccgatgtgaaaaatgtgctgacgatccctctgagcgcgttaggcgatccggttggcgataatcgttataaagtcaaattgttgcgtaatggtgaaacacgcgagcgtgaagtgacgattggcgcacgtaacgataccgatgttgagattgtcaaagggcttgaagcgggcgatgaagtggtgattggtgaggccaaaccaggagctgcacaatgacgcctttgctcgaattaaaggatattcgtcgcagctatcctgccggtgatgagcaggttgaggtgctgaagggcatcagcctcgatatttatgcgggtgagatggtcgcgattgttggcgctagcggttccggtaaaagcaccctgatgaatattctcggctgtctggataaggccaccagcggcacctatcgcgtcgccggtcaggatgttgccacgctggacgccgatgcgctggcgcaactgcgccgcgagcatttcggctttattttccagcgttaccatttgcttagccatttaaccgccgagcagaacgttgaagtacccgccgtctatgctggtcttgagcggaaacagcgactgcttcgtgcccaggagttgctgcaacggctggggctggaagaccgtacagagtattatccggcacagcttagcggtggtcagcaacagcgcgtcagcatcgcgcgggcattgatgaacggtggtcaggtaattcttgccgatgaaccaaccggcgcactggacagccattctggcgaagaggtgatggcgatcctgcatcagctgcgcgatcgtgggcatacggtgattatcgtcacccacgatccgcaggtcgctgctcaggccgagcgggtgatcgaaattcgcgacggcgaaattgtgcgcaatcctcccgccattgaaaaagtgaatgttactggcgggacggaacctgttgtcaacacggtgtctggctggcggcagtttgtcagcggttttaacgaggcgctgacgatggcatggcgggcgctggcagcgaataaaatgcgtactttactgaccatgctggggattattatcggtattgcgagcgtggtttccattgtcgtggtgggtgacgccgccaaacaaatggtgctggcggatattcgttctattggtacgaatactattgatgtctatcccgggaaagattttggcgatgacgatccgcaatatcagcaggcgctgaagtacgacgacttaatcgccatccaaaaacaaccgtgggtcgccagtgccacacctgccgtcagccaaaacctgcgcctgcgttataacaatgttgatgttgctgccagtgccaatggcgtgagcggcgattattttaatgtctatggcatgaccttcagtgaaggaaacacctttaatcaggagcagctgaacggtcgtgcgcaggtcgtggttctcgacagtaatactcgccgccagcttttcccccataaagcagatgtggttggcgaggtgattctggtcggcaatatgcccgccagagtcattggtgtggcggaagaaaaacagagcatgtttggtagcagtaaagtgctgcgtgtctggctaccttacagcacgatgtccgggcgagttatgggccagagctggcttaactccattactgtcagggtgaaagaaggatttgacagcgccgaggcggaacagcaactcacgcgtttacttagtctgcgccacggaaagaaggatttctttacctggaacatggacggcgtcttgaaaactgttgaaaagaccacacgtactttacaactgtttctgacgctggtggcggtgattagcctggtggtgggcggtattggtgtaatgaatattatgctggtgagtgtgaccgagcggacgcgggaaattggcattcgcatggctgtaggtgcgcgagcaagcgatgttttgcaacagttcctgatcgaagccgtactggtttgcctggtcggtggcgcgttgggaataacactgagtctgttaattgctttcaccttgcagcttttcttacccggctgggagattggttttagtccgttggcgctgctgctggcgtttctctgcagcacggtcaccgggattttatttggctggttacccgcacgaaatgcggcacgactggatccagtagatgctctggcacgagagtaatttttgagataaaaatgccagccgatcgggctggcattttgcctttaggatgtacacaatgagacagaagagttatgcgactgccgcttctacttcgacgggcacaataacactggcgtgattgccttttggcccctggtggacatcaaactgaacggattgtccagcttttagcgttctgtaaccatccatctgaatggtggaataatgagcgaaaatatcttcgccgccgccttcagggcagatgaaaccaaaccctttggcattgttgaaccacttaacagtacccttttccatgcttcgacatccttcgcaaatcttatacaagtaagatggaataaaccggggtcagagagggggctgttcaaaacctcgccaactctagaaatacaatttagagaattagggcgagccgtcaagcatttgacaggggacaaggggcaggtatgaatcaaaaatttgaagcagttaacgctattgacaggaatgtgacagatgtcgctgatgccaacgatagatgatagttatctatcatgtggagtagattggtcaggcaaataagctcttgtcagcggcagggcgttctgccgataaccgtaaccgaagatgataactgacaatgggtaaaacgaacgactggctggactttgatcaactggcggaagaaaaagttcgcgacgcgctaaaaccgccatctatgtataaagtgatattagtcaatgatgattacactccgatggagtttgttattgacgtgttacaaaaattcttttcttatgatgtagaacgtgcaacgcaattgatgctcgctgttcactaccaggggaaggccatttgcggagtctttaccgccgaggttgcagaaaccaaagtggcgatggtgaacaagtacgcgagggagaatgagcatccattgctgtgtacgctagaaaaagcctgaatgcaggcataaaaattgggggaggtgcctatgctcaatcaagaactggaactcagtttaaatatggctttcgccagagcgcgcgagcaccgtcatgagtttatgaccgtcgagcacttgttactggcgctgctcagtaacccatctgcccgggaggcgctggaagcgtgttctgtggatttggttgcgctccgtcaggaactggaagcctttattgaacaaaccacacccgttctgcctgccagtgaagaggagcgcgacacacagccgacgctgagttttcagcgtgtactgcaacgtgcggtcttccatgtccagtcctccggtcgcaatgaggttaccggtgcaaacgttctggtcgctatctttagcgaacaggagagccaggcggcatatctgttgcgtaaacatgaagtcagccgtctcgatgtggtgaactttatctctcatggcacgcgtaaagacgagccgacacagtcttctgatcctggcagccagccaaacagcgaagaacaagctggtggggaggaacgtatggagaatttcacgacgaacctgaatcagcttgcgcgcgtgggcggaatcgacccactgattggtcgtgagaaggagctggagcgtgctattcaggttctctgccgtcgccgtaaaaacaacccgctgctggtgggggaatctggtgtcggtaaaaccgcgattgcggaaggtcttgcctggcgaattgttcagggcgatgtgccggaagtgatggctgactgtacgatttactctctcgatatcggttctctgttagcgggcacaaaatatcgcggcgactttgaaaaacgttttaaagcgttgctcaagcagctggagcaggacactaacagcatcctgtttattgatgagatccacaccattatcggtgcgggtgcagcgtctggtggtcaggtcgatgcggctaacctaatcaaaccgttgctctccagcggtaaaattcgtgtaattggtagcacaacctatcaggagttcagcaacattttcgagaaagaccgtgctctggcgcgtcgcttccagaaaattgatattactgaaccgagcatcgaagaaactgttcaaatcatcaatggcctgaaaccgaagtatgaagcgcaccacgacgtgcgttataccgcaaaagcggtgcgtgcggcggtagagctggcggtgaaatacattaacgatcgtcatctgccggataaagccattgatgttatcgacgaagcgggcgctcgcgcacgcctgatgccggtaagcaaacgcaagaaaaccgttaatgtggcggatattgagtccgtggtggcccgtattgcacgcattccagagaagagtgtttctcagagtgatcgtgataccctgaaaaacctcggcgatcgcttgaaaatgctggtcttcggtcaggataaagccattgaggcgctgactgaagccattaagatggcgcgtgcaggtttaggtcacgaacataaaccggttggtagcttcctgtttgccggccctaccggggtcgggaaaacagaggtgacggtacagcttagcaaagctttgggcattgagcttctgcgctttgatatgtccgagtatatggaacgccataccgtcagccgtcttattggtgcgcctccgggatacgttggttttgatcagggcggtttgctgactgatgcggtcatcaagcatccacatgcggtgctgctgctggacgaaatcgagaaagcgcacccggacgtgttcaatattctgttgcaggtgatggataacggtacgctgaccgataacaacggacgcaaagcagacttccgtaacgtggtgctggtgatgaccaccaacgccggggtacgggaaactgagcgcaaatccattggtcttatccaccaggataacagcaccgatgcgatggaagagatcaagaagatctttacaccggaattccgtaaccgtctcgacaacattatctggtttgatcatctgagtaccgacgtgatccatcaggtggtggataaattcatcgtcgagttgcaggttcagctggatcagaaaggtgtttctctggaagtgagccaggaagcgcgtaactggctggccgagaaaggttacgaccgggcaatgggcgctcgtccgatggcgcgtgtcatccaggacaacctgaaaaaaccgctcgccaacgaactgctgtttggtagcctggtggacggcggtcaggtcaccgtcgcgctggataaagagaaaaatgagctgacttacggattccagagtgcacaaaagcacaaggcggaagcagcgcattaatctgattgttaggtaggttggtcaagtccgtaatctcgaaagaggttacggactttttgtttatggggtggaggaggttcagaccctttttttaatgatgatggtaagttgttgataattagtgctgcgggaaggtaaggataaaaaagggtgctgcaggagaatgggatggttttgctttattaacaacgggctaaacgtgtagtatttgagttcactgccgtacaggcagcttagaaattcacaggtaacatactccacccgcccaccatgttcactgccgtacagacagataaaatgcgaaaaaaaagctcgcactttcgtacgagctcttctttaaatatggcggtgagggggggattcgaacccccgatacgttgccgtatacacactttccaggcgtgctccttcagccactcggacacctcaccaaattgttttgctaccaaacctcatgggtggcaacggggcgctactatagggagttggagtaaaacggtcaagaagaattttaatgataattattgtttgctcatactgtaaacaagttgtgcagtatatctacatcgagacaagttacggacttatacttccaaagtacttcatacatatcacaaaataaaaaggccggttaaaccgaccttttactcgttctttctcttcgcccatcaggcggtaaaacaatcagcgactacggaagacaatgcggcctttgctcaggtcgtacggggtcagttcaacagtcactttgtcgcccgtcaggatgcggatgtagtttttgcgcattttaccggagatgtgtgcagtaaccacgtgaccgttttctaactctacgcggaacatggtattaggcaacgtttcaagaacggtaccttgcatttcaatattgtcttctttggccatctaatcctctggggtatcactaccgtaatttgaaccggcaagataatgccgaagttctgtaaataagtaaagatttgcgcgctaaatcgcaacaaacaggttcggcacattactccgaaaacacacggctaagccgcaccaaaagcgcaacgtataagggagcggtgagataaacgatgggcgttacctgacgcgaaaaattccttatcggcagcggggtaatgagcgtaaccaactctgcgaccgcaattataacactctggggagaaatgtgccgaaaacattcattcttgtggactaaacaagcatcgtggtacccagaaattattcggcaatcgtccgaggcgcatttgattgagataattaaggtaatcccggcggggaatttcgcaggcaccaaggcttgctgtgtgatcgttaaggacctggcagtcgataagcttaccgccatgaccgataaattcctcacagaataccagaagcgccgttttagacgcattttccatccggctgaacatggactcgccacaaaatagcgttccctgggccacgccgtacataccgccgacaagctcatcttcacgccagacttcaatggagtgggcatggccgagttcgtgaaggcgatggtaggcttcgatcacgccacgcgtgatccaggttccttcttcgcgatcgctggcacagccttcaatgacctgaccaaaagcgtaattcatcgtgacacgataggggctgcgtttatgaaatcgcttcatactacggctgatatgcagactttctggccatagcaccgcgcggggatcggggctccaccagaggatggggtcgcctggagaaaaccacggaaaaataccacgctggtaagccattaacaggcgcgcagggctaagatcgcccccaagtgccagcaggccgttaggctcacgtaatgcgccttccggggaagggaaggctatactatggcgagaaagctgaaccaggcgcatgaccgcaaaactccacgcaagtcggatcgttcaataatagcttacaaaccctgcttgaactggtaataacgcccctgtctggcaagcagttctgcgtgagtaccttgctcaataatttgcccgttgtccatcactattatttgttggaaacgagagagtccgcgaagtcgatgggtgaccattaacaccgttttctcacgcatcatttctgcaagcaattcaaggatctggctttcggttgtggcatctaagccttcggtaggttcatccagcaacaccagtggcgcatcatgtaacagcgcacgggcgatagccagacggcgcagttcaccaccggagagctggcgtccgccttcacctaaccaactgttgagacctgcatcctcgagcagcttttccaggccaacgcgacgcaagatctcgctcagagcctcatcactactgccagggctggcgagtaaaagattatcacgcagcgtggcgctaaacagatgcactcgctgaggaacaacgctgatggtctgtcgtagagccgcttcattcaggctggctatggggctatcgttaagcaaaatctcgccctgttgcgggtcccatgcgcgggtcagctgttgtaacagtgtacttttgccgcatccggttcgcccgagaatcgctatatgttccccggcgtttacctgaagagaaatccctttaagtgcctgttgagattgctccggataagtgaactgaacatcccgtaacgtcaggctaacgcgatcggcaacacgagtttgggtatcaggaaaggtgacctccggtttttgatccgttaagtcagagatacgtacggcagaggcaatgacttgccccagatgctgaaatgcacccgttactggtgccagtgcttcaaacgcggctaacgcgcagaagacaaacagggcaattaacgcgccgggttgagcattgccgccaacgccgccagacgccatccacagcatcaggatcaccgctaacgcgccaatgagcagcattatcgcttggctcaatgcggtcagttcagattgacggcgttgcgcttccagccattgaatttctgtattctctagttgcgtgcgataacgatcgctggcaccaaaaatggtcagctcagcttgcccttgcagccaggccgtcagttgttggcgatactgtccgcgaagatgagtcagattttgcccggtgctttttcccgcacgataaaacagcggtggcatcaggaaaagcgtcagtaacataatgccgcccagcgtaaaggcgagggtgaaatcaaggaaacttaacccgattgtcaccaccataatcaccacaaaagcgcccaccagcgggctgataacgcgcaggtaaagatgatcgagcgtatcaacatccgccaccacgcgattgagcaattcgccctgacgatagcgcgccagtccggcaggggagaggggcagcaatttgctgaaggtgtaaatgcgcagatgctgcaacacgcggaaagtcgcgtcgtgacttaccagacgttcaaaatagcgcccggcagtacgggtgattgctgcgccacgcacgcccgcagcgggtagcatatagttgaagctgtacagtccggcaacccccgcaaccgcactggcgctgaggaaccagccggaaagtgtcaacagaccgatactggcgagcagcgtcacaattgccagcacaataccaagacttaacatccatttatgacgtttatacagtgccagatagggtagcaaagcgcgcatttaaatctcctcctgacgatgggccagtaatgtggcgaatgggccaccagccacacttaattccgcgtaacgtccttgctcaataatccggccatcctgcataacccaaatgacatcccagtcagcaagatcttctaactggtgggtgaccattaacgttgtctggcgcagagaggcggcattcagcgcctccattacgcgctgttcactgtgagcatcaaggctggcagcgggttcatccaacagtaataggctacagggatttagtaacgcacgggccaccgccacgcgctgcgcctgccccacggaaaggcgggcagcctggtcgccaacaggcgtatcaacgccttgtgggaggagcggtagaaactcgctgacccaggcgttatccagcgctgcttgtaattcttgttcgctggcatcaggtcgcgccagtagtacgttatcccgcaatgttgctgccggtaattgtgggttttgcccaacccaggagagatgtttacgccaactttctggacttaaatcgcgtaattctatcccgttgattcgtaggcttccctgataactgagaaaaccagaaagcgcgttcagcagactgcttttaccactaccgctgcgaccaaccaacaccgcacgttggcctgctggcaaagtaaagttcagcggtccggccagcgttttaccttccgggctcgtgataaacagctcctcggcctcaatggtcaccggatcggtgcttgctaattccgcctcaccacgttgcggatgggcgagcggggtttccataaacgttttcagactgtcagctgcgccaacagcctgggctttagcatgataaaacgtaccgagatcgcgtaatggctggaaaaactctggcgcaaggatcagggccagaaaacccgcagccagcgtcacaccggtatcgtagtgaccaaaatccagctcgccgagataggaaaaaccaaagtagaccgccaccagagcaatactcaggctggtaaaaaattcgagaatgccggaggataaaaacgccagccgtagcacttccattgtccgttggcggaaatcttcgctagcagaacgaatactttcaatttcagcttcaccacgaccaaaaatacgcaatgtttccatgccgcgcaggcgatcgaggaaatgcccacttaagcgagcaagagcgagaaagttacgtcggttagcatcggcagcccccattccaaccagcgccataaacaacggaattaacggtgcagtgcccagcagaatgagcgccgcagcccagttagaggggaagattgccaccacaatcagcaacggcacgctcactgccagcgccatttgcggcagatagcgtgcatagtaatcatgcatatcgtcaatttgctcgagtaccagcgtcgcccagctccccgcaggtttaccctgaatccacgctggccctgcttgttgcagacggtcgagaacctgacggcggatggcaaagcggatatgctgcccggcgtgataacccacccgttcgcgtaaccagaccacccatgcgcgcagtacaaaggtcagaaccagtaacgtaaagggaagcagcagggcttcacggggaatattctccataatcatatgttgcagaattcgcgccatgaaccaggcctgggcaatgatcaatatgccgctcacaaagcccagcagacgagaaatattcagccaacgttgggagatgacgctttgctgttttaaccagcgggttaactctttttgacgagatttattcattgcacgcttagcaggtgagttatcagaattatttgcagagcaatgttacaacggggaaaaaataaaggcgacccatagtcgcatggtgtcgccttctttacttttgttactgatttgtaaaattattttgcgtcagctaaaccatcgaggtagcgttccgcatcaagtgctgccatgcagcctgtaccggcgctagtaatggcctggcgataaatgtgatccatcacgtcgcctgcggcaaagacgccaggaatgctggtctgggtggcattaccatgaataccgctctgtactttgatgtagccgttttccagttccagctgcccttcgaaaatcgcagtattcgggctgtgaccgatagcaacaaacagaccggcaacgtcgagactctcgatgttatcgctgttttgcgtatcgcgcagacgaacgccagtgacacccatttgatcgccggtcacttcttccagcgtacggttggtgtgcagaatgatgttgccgttctccactttatccatcaggcgcttaatgaggattttttccgcgcggaaaccgtcacggcggtgaatcagatgcacttcgctagcgatgttagacagatacagcgcctcttcaaccgcggtattgccgccgccgatgaccgcaactttctggttgcgatagaagaaaccgtcgcaggttgcacaagcagaaaccccacggcctttaaaggcttcttcagagggcaggccgagatagcgtgcagaagctccggtggcaataatcagcgcgtcgcaagtgtattcgccgttatcgccattcagacggaacggacggttttgcagatccaccttgttgatatgatcaaaaatgatctcagtttcaaacttggtggcatgttcgtgcatgcgctccattaataacggaccggtcagatcgtttggatcgccaggccagttttccacttccgtggtggtggtcagttggccgcctttttccatgccggtaatcagcacaggttgcaggttggcgcgcgccgcgtagacagcagcggtgtatcccgccgggccactacccaggataagcagtttactgtgtttggtcgtgcccatgagatccccatagttgttggcagacaatgggcaggattgtagggaatttacagacgtaaaaaaagagtatgacgattttgttaacaatttgtgcaatcggcagcatcgataagcaggtcaaattctcccgtcattatcacctctgctacttaaatttcccgctttataagccgattaaatgatgaataaacgcccctgttaatgaatatctggcatgttgtactaaaaatcgatgttttgctttgacaatcccctggtgttttgcgaaaacattcgaggaagaaaaaaaacagtattcttatatgcgcataaccatgcatgtaaataccatgtttaccgtgctagtgaaatctacgtatggcgtggacagacgccattcgtgatgtcgatagctgccacaaggcaacggtcttctcaccgtagacccaggcattgcgcgccgtgaatcttcatgatttcggtctatcgtgacgggtagcgactctgaacagtgatgtttcagggtcagacaggagtagggaaggaatacagagagacaataataatggtagatagcaagaagcgccctggcaaagatctcgaccgtatcgatcgtaacattcttaatgagttgcaaaaggatgggcgtatttctaacgtcgagctttctaaacgtgtgggactttccccaacgccgtgccttgagcgtgtgcgtcggctggaaagacaagggtttattcagggctatacggcgctgcttaacccccattatctggatgcaagtcttctggtattcgttgagattactctgaatcgtggcgcaccggatgtgtttgaacaattcaataccgctgtacaaaaacttgaagaaattcaggagtgtcatttagtatccggtgatttcgactacctgttgaaaacacgcgtgccggatatgagtgcctaccgtaagttgctgggggaaaccctgctgcgtctgcctggcgtcaatgacacacggacatacgttgttatggaagaagtcaagcagagtaatcgtctggttattaagacgcgctaacacggaacaggtgcaaaatcggcgtattttgattacactcctgttaatccatacagcaacagtactggggtaacctggtactgttgtccgttttagcatcgggcaggaaaagcctgtaacctggagagcctttcttgagccaggaatacattgaagacaaagaagtcacattgacaaagttaagtagcggccgccgccttctggaggcgttgctgatccttattgtcctgtttgccgtctggttgatggctgccttactaagctttaaccctagcgaccccagctggagccaaacggcctggcatgaacctatccataatttaggtgggatgcccggtgcgtggttggcagatacgctgttctttatttttggcgtgatggcttacaccattcccgtcattattgtcggcggttgttggtttgcctggcgtcatcagtccagcgacgaatacattgattattttgccgttagcctacgcatcattggcgttttggcgctcatccttacctcctgtggtctggcggcaatcaacgctgacgatatctggtattttgcctccggtggcgtcattggcagcttactaagcactacgctacaaccactgctacacagtagcgggggaactattgcgctgctctgcgtttgggcagcgggcctgacgttgttcaccggttggagttgggtgaccattgctgaaaaactcggcggctggattttaaacattctcaccttcgccagtaatcgtacccgtcgcgatgatacctgggtcgatgaagatgagtatgaagacgacgaagagtatgaagatgaaaatcacggcaaacagcatgaaagtcgccgtgcccgtattcttcgcggcgcgctagcgcgtcgtaaacggttggcggaaaaattcattaatccgatggggcggcaaacagacgctgcgttgttctccggtaagcggatggatgatgacgaagagattacctacactgcacgcggtgtggctgccgacccggacgacgtcctatttagcggcaatcgtgcaacgcagccagaatatgacgaatacgatccattattaaacggtgcgccaattaccgaacctgtcgctgtagcagctgctgctaccacggcgacacaaagctgggctgcgccggttgaacctgtgactcagacgccgcctgttgcctctgttgatgttccacctgcgcaacctacagtagcctggcagcctgtaccgggtccacaaacgggagagccggttattgctcctgcaccggaaggttacccacagcagagtcaatatgcgcagcctgcagtgcaatataatgagccgctgcaacaaccagtacagccgcagcagccgtattatgcacctgcagctgaacaacctgcgcaacagccgtattatgcccctgcgccagaacaaccggtggcaggtaacgcctggcaagccgaagagcagcaatccacttttgctccacagtctacataccagactgagcaaacttatcagcagccagccgctcaggagccgttgtaccaacagccgcaacccgttgaacagcagcctgttgtggagcctgaacccgttgtagaagagacaaaacccgcgcgtccgccgctttactactttgaagaagttgaagagaagcgagcccgtgaacgtgaacaacttgcggcctggtatcaaccgattccagaaccggttaaagaaccagaaccgatcaaatctagcctgaaagcaccttctgttgcagcagtacctccagtagaagccgctgccgctgtttccccgctggcatctggcgtgaaaaaagcgacactggcgacgggggctgccgcaaccgttgccgcgccagtcttcagtctggcaaatagcggtggaccgcgtcctcaggtcaaagaggggattggtccgcagttgccacgaccgaaacgtatccgcgtgccaactcgtcgtgaactggcgtcttacggtattaagctgcccagtcagcgtgcggcggaagaaaaagcccgtgaagcccagcgcaatcagtacgattctggcgatcagtacaacgatgatgaaatcgatgcgatgcagcaggatgaactggcacgtcagttcgcccagacacagcagcaacgctatggcgaacagtatcaacatgatgtgcccgtaaacgcagaagatgcagatgctgcggcagaggctgaactggctcgtcagtttgcgcaaactcaacaacaacgttattccggcgaacaaccggctggggcgaatccgttcagcctggatgattttgaatttagcccaatgaaagcgttgctggatgatggtccacacgaaccgttgtttacgccaattgttgaacctgtacagcagccgcaacaaccggttgcaccgcagcagcaatatcagcagccgcaacaaccagttccgccgcagccgcagtatcagcagccacaacagccggttgcgccgcagccacaatatcagcagccgcaacaaccggttgcgccacagcagcaatatcagcagccgcaacaaccggttgcgccgcagcagcagtatcagcagccacaacagccagttgcgccacaaccgcaggataccctgcttcatccgctgttgatgcgtaatggcgacagccgtccgttgcataaaccgacgacgccgctgccttctctggatttgctgacaccgccgccgagcgaagtggagccggtagatacctttgcgcttgaacaaatggctcgcctggtggaagcgcgtctggctgatttccgtattaaagccgatgtcgtcaattactctccggggccggttatcactcgctttgaattgaacctggcaccgggcgtaaaagcggcgcgcatttctaacttgagtcgggaccttgcccgtagtcttagcacggtggcggtgcgtgtcgttgaagttattcctggcaaaccctatgtaggtctggagttaccgaataaaaaacgacaaaccgtttatctgcgcgaagttttggataacgccaaattccgcgataatccgagcccattaaccgtggtgctgggtaaagatatcgccggtgagccggtggttgccgatctggcgaaaatgccgcacttgttggttgcggggactaccggttccggtaaatctgtcggtgtgaacgcgatgatcctgagcatgctttataaagcacagccagaagatgtgcgtttcatcatgatcgacccgaaaatgctggagcttagcgtttatgaaggcattccgcatctgttaacggaagtcgttactgatatgaaagatgccgccaacgcgctgcgctggtgtgttaacgagatggagcgtcggtataaactgatgtctgcgctgggtgtgcgtaatctggcgggttataacgaaaaaattgctgaagccgatcgcatgatgcgtccgattccagacccgtactggaagccgggtgacagtatggatgcccagcatccggtgctgaaaaaagaaccatacattgtggtgttggttgacgaatttgccgacctgatgatgacggtaggtaaaaaagtggaagagctgatagcacgtctggcgcaaaaagcccgtgccgcgggtatccacctcgtactggcaactcagcgtccaagcgttgatgttattactggtctgattaaagcgaatattccgacccgtatcgcctttaccgtatccagtaagattgacagtcgtaccattcttgatcaggctggcgcggaaagtctgctgggtatgggggatatgctctactctgggccgaactccacgttgccggtacgtgtccatggtgcttttgttcgcgatcaggaagttcatgccgtggtgcaggactggaaagcgcgtggtcgcccacagtatgttgatggcatcacctccgacagcgaaagcgaaggtggtgcgggtggtttcgatggcgctgaagaactggatccgttgttcgatcaggcggtgcagtttgtcactgaaaaacgcaaagcgagtatttctggcgtacagcgtcagttccgcattggttataaccgtgcagcgcgtattatcgaacagatggaagcgcaggggattgtcagcgaacaggggcacaacggtaatcgtgaagtgctggccccaccgccgtttgactaactaatgcatcgtatgccggataaggcgcggtagcgtcgcatccggcactctatcaactgaaaattcagtattttcttctttcctcaagctgattattagcctggaatagagagtagagggaactcccgatcgggagtgacgtaatttgaggaataatgatgaaaaaaattgccatcacctgtgcattactcagtagcttagtagcaagcagcgtttgggctgatgccgcaagcgatctgaaaagccgcctggataaagtcagcagcttccacgccagcttcacacaaaaagtgactgacggtagcggcgcggcggtgcaggaaggtcagggcgatctgtgggtgaaacgtccaaacttattcaactggcatatgacacaacctgatgaaagcattctggtttctgacggtaaaacactgtggttctataacccgttcgttgagcaagctacggcaacctggctgaaagatgccaccggtaatacgccgtttatgctgattgcccgcaaccagtccagcgactggcagcagtacaatatcaaacagaatggcgatgactttgtcctgacgccgaaagccagcaatggcaatctgaagcagttcaccattaacgtgggacgtgatggcacaatccatcagtttagcgcggtggagcaggacgatcagcgcagcagttatcaactgaaatcccagcaaaatggggctgtggatgcagcgaaatttaccttcaccccgccgcaaggcgtcacggtagatgatcaacgtaagtaaaggcacctgagtgagcaatctgagcctcgattttagcgataatacttttcaacctctggccgcgcgtatgcggccagaaaatttagcacagtatatcggccagcaacatttgctggctgcggggaagccgttgccgcgcgctatcgaagccgggcatttacattctatgatcctctgggggccgccgggtaccggcaaaacaactctcgctgaagtgattgcccgctatgcgaacgctgatgtggaacgtatttctgccgtcacctctggcgtgaaagagattcgcgaggcgatcgagcgcgcccggcaaaaccgcaatgcaggtcgccgcactattctttttgttgacgaagttcaccgtttcaacaaaagccagcaggatgcatttctgccacatattgaagacggcaccatcacttttattggcgcaaccactgaaaacccgagctttgagcttaatagcgcactgctttcccgtgcccgtgtctatctgttgaaatccctgagtacagaggatattgagcaagtactaactcaggcgatggaagacaaaacccgtggctatggtggtcaggatattgttctgccagatgaaacacgacgcgccattgctgaactggtgaatggcgacgcgcgccgggcgttaaatacgctggaaatgatggcggatatggccgaagtcgatgatagcggtaagcgggtcctgaagcctgaattactgaccgaaatcgccggtgaacgtagcgcccgctttgataacaaaggcgatcgcttttacgatctgatttccgcactgcataagagcgtacgtggtagcgcacccgatgcggcgctgtactggtatgcgcgaattattaccgctggtggcgatccgttatatgtcgcgcgtcgctgtctggcgattgcgtctgaagacgtcggtaatgccgatccacgggcgatgcaggtggcaattgcggcctgggattgctttactcgcgttggcccggcggaaggtgaacgcgccattgctcaggcgattgtttacctggcctgcgcgccaaaaagcaacgctgtctacactgcgtttaaagccgcgctggccgatgctcgcgaacgcccggattatgacgtgccggttcatttgcgtaatgcgccgacgaaattaatgaaggaaatgggctacgggcaggaatatcgttacgctcatgatgaagcaaacgcttatgctgccggtgaggtttacttcccgccggaaatagcacaaacacgctattatttcccgacaaacaggggccttgaaggcaagattggcgaaaagctcgcctggctggctgaacaggatcaaaatagccccataaaacgctaccgttaatgttatcgttgcggtaatgttgttactgtatccctgtggtcgcaggctgtggccacatctcccatttaattcgataagcacaggataagcatgctcgatcccaatctgctgcgtaatgagccagacgcagtcgctgaaaaactggcacgccggggctttaagctggatgtagataagctgggcgctcttgaagagcgtcgtaaagtattgcaggtcaaaacggaaaacctgcaagcggagcgtaactcccgaagcaaatccattggccaggcgaaagcgcgcggggaagatatcgagcctttacgtctggaagtgaacaaactgggcgaagagctggatgcagcaaaagccgagctggatgctttacaggctgaaattcgcgatatcgcgctgaccatccctaacctgcctgcagatgaagtgccggtaggtaaagacgaaaatgacaacgttgaagtcagccgctggggtaccccgcgtgagtttgactttgaagttcgtgaccacgtgacgctgggtgaaatgcactctggcctcgactttgcagctgcagttaagctgactggttcccgctttgtggtaatgaaagggcagattgctcgcatgcaccgcgcactgagccagtttatgctggatctgcataccgaacagcatggctacagtgagaactatgttccgtacctggttaaccaggacacgctgtacggtacgggtcaactgccgaaatttgctggcgatctgttccatactcgtccgctggaagaagaagcagacaccagtaactatgcgctgatcccaacggcagaagttccgctgactaacctggtgcgcggtgaaatcatcgatgaagatgatctgccaattaagatgaccgcccacaccccatgcttccgttctgaagccggtagttatggtcgtgacacccgtggtctgatccgtatgcaccagttcgacaaagttgaaatggtgcagatcgtgcgcccagaagacagtatggcggcgctggaagagatgactggtcatgcagaaaaagtcctgcagttgctgggcctgccgtaccgtaaaatcatcctttgcactggcgacatgggctttggcgcttgcaaaacttacgacctggaagtatggatcccggcacagaacacctaccgtgagatctcttcctgctccaacgtttgggatttccaggcacgtcgtatgcaggcacgttgccgcagcaagagcgacaagaaaacccgtctggttcataccctgaacggttctggtctggctgttggtcgtacgctggttgcagtaatggaaaactatcagcaggctgatggtcgtattgaagtaccagaagttctgcgtccgtatatgaacggactggaatatattggctaatacccaatttttctgaatctaaaaagcgcctgcgggcgctttttttgtctccctttgataccgaacaataattactcctcacttacacgtaatactactttcgagtgaaaatctacctatctctttgattttcaaattattcgatgtatacaagcctatatagcgaactgctatagaaataattacacaatacggtttgttactggaatcaatcgtgagcaagcttgagtgagccattatgaaaacgaaaatccctgatgcggtattggctgctgaggtgagtcgccgtggtttggtaaaaacgacagcgatcggcggcctggcaatggccagcagcgcattaacattaccttttagtcggattgcgcacgctgtcgatagcgccattccaacaaaaagtgacgaaaaggttatctggagcgcctgtacagttaactgtggtagtcgctgcccgctacgtatgcacgtcgtggacggtgaaatcaaatatgtcgaaacggacaataccggcgatgacaattacgacggcctgcaccaggttcgcgcctgcctgcgtgggcgttccatgcgtcgccgtgtctacaatccggaccgcctgaaatatccgatgaaacgagtcggggcgcgcggtgaaggcaaattcgagcgcattagctgggaagaagcctacgacatcatcgcgaccaatatgcagcgcctgatcaaagagtacggcaacgagtctatctatctgaactatggcaccggtacgctgggcggcaccatgacccgctcctggccgccgggaaataccctggtcgcgcggctgatgaactgctgcggcggctatctgaaccattacggcgactactcctccgcgcaaattgcggaaggtttgaactatacctacggcggctgggcagatggcaacagcccgagcgatatcgaaaacagtaagctggtagtgctgtttggtaataaccctggcgaaacgcgaatgagtggcggtggggtgacttactatcttgaacaggcacgccagaaatctaatgcccgcatgatcatcatcgatccgcgctataccgacaccggtgccgggcgcgaagatgagtggatccctattcgtccgggaacagatgccgcactggttaacggtctggcgtacgtcatgatcactgaaaacctggtggatcaggcattcctcgataaatattgcgttggctacgatgagaaaaccctgccagccagtgcgccgaaaaatggccactataaagcttatattctgggtgaagggccagatggcgtggctaaaacgccggaatgggccagccaaatcactggtgttccggcagacaaaatcatcaaattggctcgtgaaatcggtagtaccaaaccggcgtttatcagccagggatggggcccgcagcgtcacgctaacggtgaaatcgcaacccgtgctatcagcatgctggcgattctgaccggtaacgttggtattaacggaggcaacagcggcgcgcgtgaaggtagttacagcttaccgtttgtccgtatgccgaccttggaaaacccgatccagaccagcattagcatgtttatgtggaccgatgccattgaacgtggcccggaaatgacggcgctgcgtgatggtgtacgcgggaaagataagctggatgtgccgatcaaaatgatctggaactatgccggtaactgcctgattaaccagcattctgaaatcaaccgtacccatgaaatccttcaggatgataagaagtgcgagctgattgtggttatcgactgccacatgaccagtagcgcgaaatatgctgacatcctgctgcctgactgcaccgcttccgaacagatggactttgcgctggatgcatcctgcgggaatatgtcttacgtgattttcaacgatcaggtgattaaaccgcgctttgaatgtaagaccatctatgaaatgaccagcgaactggcaaaacgtcttggcgttgagcaacagtttactgaaggccgtacccaggaagagtggatgcggcatctgtatgcccagagccgggaagcgattcctgaactgccaacgtttgaagagttccgcaagcaggggatctttaaaaagcgcgacccacaagggcatcacgttgcttataaagccttccgtgaagatccgcaggcaaacccactgactacgccaagcggcaaaattgagatttatagccaggcgctggctgacattgccgctacctgggaattgcctgaaggcgatgtgatcgatccactgccgatctacacgccgggctttgaaagttatcaggatccgctgaacaaacagtatccgctgcagcttacaggtttccactataaatctcgcgttcacagtacttacggcaacgttgatgtgctgaaagcggcttgccgtcaggaaatgtggatcaacccgcttgatgcccaaaaacgcggtatccacaacggcgataaagtcaggatctttaacgatcgtggtgaggttcatattgaggcgaaagtgacgccacgaatgatgccgggtgtggtcgcactgggtgaaggtgcctggtatgacccggatgcaaaacgtgtcgataagggtggttgtattaacgtactgaccactcaacgtccgtctcctctcgctaaggggaatccgagtcatacaaaccttgttcaggttgaaaaggtgtaaggagtaaccgatgacaacccagtatggattttttattgattccagccgttgcaccggttgcaaaacctgcgagctggcctgtaaagactacaaagatttgacgccagaagtcagcttccgccgcatttatgaatatgctggcggcgactggcaggaagataacggtgtctggcaccagaacgtgtttgcctactatctgagcattagttgtaaccactgcgaagatccggcttgtactaaagtctgcccgagcggtgcgatgcataaacgtgaagatggttttgttgtggtcgatgaagatgtgtgcattggctgccgctactgccatatggcttgcccgtatggcgcaccgcaatataacgaaacgaaaggccatatgaccaaatgcgatggttgttatgaccgtgttgcggagggtaaaaagccgatctgtgttgaatcttgtccgctgcgggcgctggatttcggccctatcgacgagctgcgtaaaaaacatggcgatctggcggccgttgcgccgttgccgcgagctcactttaccaaaccgaatattgtgatcaaacccaatgccaatagccgcccgaccggggataccactggctatctggcaaacccgaaggaggtgtgagatgggaagtggatggcatgaatggccgctgatgatcttcacggtcttcgggcaatgtgtagcaggtggttttatcgttctggctttggcgctgctcaaaggcgacctgcgagcagaagcccagcagcgtgttatcgcctgcatgtttggtttatgggtgctgatgggcattggctttatcgcctctatgctccatcttggtagtccaatgcgcgcttttaacagcctcaaccgggtaggggctagtgcactcagtaacgaaatcgccagcggtagcatcttttttgccgtaggcggcatcggctggttgctggcaatgctgaaaaagctgagtccggcattgcgtacgctgtggctgatagtgacgatggttcttggcgtcatctttgtctggatgatggtgcgtgtgtataacagcattgataccgttccgacctggtacagcatctggacgccgatgggcttcttcctgacgatgtttatgggcggcccgttactgggttacctgttgttgagtctggctggcgtcgatggctgggcgatgcgtctgctgccagcaatttctgtactggcactggtagtgagtggcgtggtgagtgtgatgcagggcgcagagctggcgactattcatagttctgtgcagcaggccgcagcgctggtgccggactatggtgcgctgatgtcctggcggatcgtgcttttggccgttgccctgtgcttgtggattgcaccacagctaaaaggttatcagcctgcggttccgctactttctgtaagtttcattctgcttctggcaggggaattaatcggtcgcggcgtattctatggtttgcatatgaccgtggggatggccgtcgcaagctaatcataacaaccggggtttcggccccggttctcttttatttctgcttcgttaacgtgtcataactggtcatcaaattacgataatcaggaatgtggttagagaacaacgtcgccagtccttcaatatcattacgccagtcgcgatgcagctcgcacgccacgccgaaccatgtcatcaattgcgcaccagcttggctcaagcgatcccatgcgctatgccgggtaatttcattaaaggtcccactcgcgtcagtcacgacaaagacgtcaaacccttcttcaatggcactaagcgccgggaatgccacgcaaacttcggttaccacaccggcaataattaactgttttttacctgtcgctttgacagcttttacaaaatcttcgttatcccaggcgttaatatttcccgggcgagcaatgtaaggtgtatcggggaattgtgctttcagttctggaactaatgggccgttaggaccggtttcaaaactggtggtaagaatagttggtaagttgaaatacttagccaggtcacccagcgccagcacgttatttttaaacttatcgggttcgatatcccgtacaagggaaagtaaaccagcctggtgatcaacaagcaaaacggcagcatcatttttatcaagacgaacatacggtttggtcatcctcttctcctttcgagagtcagtggtacgtctgaaatcgatcagacgcgatgcattgctctgaaagcatagacgggaaatatgagtttgctgtgaccatgaaatttttcgactgaacgaagcgtatgaaatttgtgttagttcaataaaaacaatcagatgagactaatcatctcttcagcattagcgttatgaatgagtaatataaatcgataataccgccgctgggatatcgcgtattttcacccattgacaatgtttttggcggtggcatgatgcgcatgaaatttgaacttcctcacggttttaattcatgtccacgtatacccagcctgtcatgcttttgctgtctggcctgcttttgttgactctggcgattgcggtgttaaatacactcgtgccgctttggctcgcccaggaacacatgtccacatggcaggtaggcgttgtcagcagttcctattttaccggcaaccttgtcggtacattgctgacagggtatgtcattaagcgcattggctttaaccgcagctattatctggcctccttcatttttgccgctggctgtgccggccttggcctgatgattggattctggagctggttggcttggcgttttgtcgcgggcgtcggctgtgccatgatttgggtggttgttgagagcgcgctgatgtgcagtgggacgagtcgtaaccgtgggcgtttgcttgctgcgtatatgatggtttattacgtgggaacgtttttaggccagttactggtcagcaaagttagtaccgagctgatgtccgtattgccgtgggttacaggtttgacgttggcagggatcttaccgctgttgtttacgcgtgtgctgaatcagcaggctgaaaaccatgatagcacgagtattacgagtatgctaaaactccgtcaggcgcggcttggcgtgaatggctgcattatcagtggaatcgttctgggatctctatatggcctgatgccgctgtacctcaatcacaaaggggtgagcaatgccagcattggtttctggatggcggtactggtcagtgcgggtatccttggacaatggccgattggacgtctggcggataagtttggtcgactgctggtgttgcgtgttcaggtctttgtcgtcattctcggcagtatcgcgatgcttagccaggcggcgatggccccagcgttattcatcctcggtgccgctggctttacgctatatccggtggcgatggcatgggcttgcgagaaagttgaacatcatcaactggtggcgatgaaccaggccttactgttgagctatactgtgggaagcctgcttggcccgagttttaccgctatgctaatgcagaatttctccgataatttattgtttatcatgatcgccagcgtaagctttatctatttgctgatgctgctgcgcaacgccggtcatacgccgaaacccgttgctcacgtgtaaatgaattcaagcagagtgtgaacttactgtttcacactctgcttttttgtttcttctatctgacttgctttattccaaattttattcgtttaaaaataaaatgtgcagcaggttataattttgcatttcgctatttccgcacttcttatttgccgcgcataatccctcgttttaccgatgcccctttaattttggcgaaggatttgtctatggctgggaatgttcaggaaaaacagttgcgatggtacaacattgcgctgatgtcttttatcactgtctggggttttggcaacgttgttaataactatgccaaccaggggctggtggttgtttttagttgggtgtttatctttgcactctatttcacaccttatgcgctaattgttggtcagttaggcagcaccttcaaagatgggaagggcggggtcagtacctggattaaacacacgatgggacccggactggcttatctcgccgcgtggacctactgggtggtgcatattccctatctggcacaaaaaccccaggcaattctgattgcgctcggttgggcgatgaaaggcgacggtagcctaatcaaagaatatagtgtcgtagcgttacaggggttaacgctggtgctgtttatcttctttatgtgggttgctagtcgcggtatgaaaagcctgaaaatcgtcggttctgtggcagggattgctatgtttgttatgagtctcctgtatgtggcgatggcggtaaccgcgcctgcaattactgaagtgcatattgcgaccacaaacattacctgggaaacgttcattcctcatatcgactttacctacattaccactattagtatgctggttttcgcggttggcggagcagagaagatttctccttacgttaatcaaacgcgcaacccaggaaaagaatttccaaaagggatgttatgcctggcggtgatggttgcggtttgtgccattctgggcagcctggcgatggggatgatgtttgatagccgtaatatcccggatgacttaatgaccaacggtcagtattacgcctttcagaagctgggcgagtattacaacatgggtaatactttaatggtgatttacgccattgcgaataccctgggacaagtagcggcgctggtattcagcattgatgccccgcttaaagtgctattaggtgatgctgacagcaaatatattccagccagtttatgtcgtaccaacgcttctggtacgcccgttaatggctattttctgaccctggtactggtggcgattctgattatgctgccgactctcggcattggtgatatgaacaatctctataaatggctgttgaaccttaatagcgtagtgatgccgctgcgttatttatgggtatttgttgcatttattgcagtcgttcgcttggcgcagaaatataaaccagaatatgtctttattcgtaataagcctctggcaatgaccgtcgggatttggtgttttgcctttaccgcctttgcctgtttgacggggatcttcccgaaaatggaagccttcactgcagagtggaccttccagttggcgctgaatgttgcaacgccgtttgtgctggtaggattaggactgatattcccgctgctggcgcgtaaagcgaatagtaaataattattgtggtcggtgacgctgactctggcagatctgacccgtttttacataatcgagaaatgcgcgcaagccgcaggacatatactggcggtttggataatagatctggaagcctggacgctctgtgctccagtcttccagtacacattctaaacgaccagtatcaaggtactccttgatctgttcatagagcagatacccgataccagcacccatcaaaacggcctccagttcagcatcaacatcatccagaatgatatttcctgcgacagcaatttccagctcctttgcaaattgccagtggaaaggtttgccgctgggataacgaaaaacaacacattgatgattaagcagatcatgaggatggcggggtttgccatatcttgcaaagtactctggcgttgctgctacacataatttcactggcgggccgatcgccacgctgatcatatctttttcgacgatgcaactaagtcgaacgccagcgtcaaagccctgttggacgatatcgacaagagagtcgtcagttgtgagctcgactttaatatcaggatattcacgtgtgaaaccaaccagtaaagacattaaaaatatacgtgcagctacccgggcggcattgattttgagcgttcctgtcggtgtcagacgaaaatcattcatctcatctaacatgatctgaatttcgtcgaaagctgggcgcaatcgttcatagagattagaacccgcttccgttaagcttacgcttcgggttgtccgattgaataagcgaattttaagacgttgttccagtgttttaatactatggctaatggcggagctggataagcctaactcatcgcccgctgcacgaaagctttgattacgggccacggcaaagaaagtggcaaagtcagacatattcatccgcattagtgaaaatccttcattaactcatcctgaatcatcacgtttacaggattatgccgcctgcgtaaagtgcgctccagaacttaacgtggaggtaaaattatgcagtctgaacgtatttatttggtatgggcccatcctcgtcatgatagtttgaccgcacatattgctgatgcgatccatcagcgggcaatggagcggaaaatacaggtgacggaactcgatttatatcggcgtaatttcaacccagtgatgacgccggaagatgaaccagactggaagaatatggataaacgttattctccagaggttcatcagctttatagtgagctgcttgaacatgacacgttagtggtggtttttcctctctggtggtacagcttcccggcaatgctaaaaggatatattgacagagtatggaataatgggctggcttatggagatgggcacaaattaccattcaataaagttcgttgggtggcgctggttggaggagacaaagaaagttttgtccagatgggctgggaaaaaaatataagcgattatttaaaaaatatgtgcagttatcttggtattgaagatgccgatgtcactttcttgtgtaatacagtggtattcgatggggaagaacttcacgcgagctattatcagagcttattatctcaggtacgggatatggtagatgcactataagatgtgttaaaaacgctgtagcagaatgaagcgcggaataaaaaagcggcaactcaataaagttgccgctttacggggaaattagaacattaccttatgaccgtactgctcaagaatgcctttcacgcgttccatggtctctttcttcggtggtttaacaccgtcgagtttgtactcttcacccattgccacccatttgtgtttgcccagctcgtggtaggggagaagctcgattttctcaacgttgcccatatcacgggtaaattcaccgaggcgatgcgcactatcgtcatcgtcagaccagcctgggacaacaacgtagcggatccacaccttcacatttttgttcgccagatatttagcgaactccagcgtgcggtggttggaaactccaaccagattttggtggatctcgtcgttcatctgtttgagatcgagcattaccaggtcggttacttccagcagttcatcaatcaccggatcgtaacgacgaacaaaaccgttggtgtccagacaggtatgaatgccttcttttttgcaggcgcggaaccagtcacgaacaaactcagcttgcaggattgcttcaccgccggatgcggtaacgccgccgccggaagcgttcataaagtggcgataggtcaccacttccttcatcaaatcttcaacggtaacttctttaccgccatgcgtgtcccaggtgtcgcggttatgacaatacaggcagcgcatcaggcagccctggaaaaaggtgataaagcgaatacctgggccgtctacggttccacaggattcaaaggagtgaatgcgaccaataacactcattgcggtgtttctccagatgtggcccatctgaggccgtgttggtgcgcagctcgaaggctacgtcgagtctgttttggcagtcaccttaaagtatagatagctgacaaaaaaggctctcgcgctaaaaaaggccccactttcgtggagcctttattgtacgctttttactgtacgatttcagtcaaatctaattacatagattgagtgaaggtacgagtaataacgtcctgctgctgttctttagtcaggctgttgaaacgtactgcgtagccagatacacggatggtcagctgcggatatttttccgggttttccatcgcgtcgagcagcatttcacggttcatcacgttaacgttcaggtgctgaccaccttcgatggatgcttcgtggtggaagtaaccatccatcagaccagccaggttggtcttacgaacttcgtcgtctttacccagtgcgttcggaacgatagagaaggtgtaggagataccatctttagcgtaagcaaacggcagtttagcaacggaagtcagagaggctactgcacctttctggtcacgaccgtgcatcgggttagcacccggtccgaacggcgcgccagcacgacgaccgtctggggtgttacccgttttcttaccatacacaacgttagaagtgatggtcagaacagactgagtcgggatagcgtcacggtaggtgtgcagtttctgaattttcttcatgaaacgttctaccaggtcaacagccaggtcatctacacgcggatcattgttaccaaactgcgggtattcgccttcgatttcgaagtcgatagccagaccgtcttcgtcacgaatcggtttaactttcgcatatttgattgcagacagggagtcagcagcaacggacagaccagcgataccacacgccatggtgcggataacgtcacggtcgtgcagcgccatcagagaggcttcgtagctgtacttgtcgtgcatgtagtggatgatgttcagtgcagtgatgtactgtttagccagccagtccatgaagtgatccatgcgctccatcacttcatcatagttcaggacatcgcctttgatcggttcagacttcggaccaacctgcattttcagtttttcgtcaacgccgccgttgattgcgtacagcatggttttcgccaggtttgcacgcgcaccgaagaactgcatttgtttaccaacgatcatcgggcttacgcagcaagcaatagcgtagtcatcgttgttgaagtccggacgcatcaggtcatcgttctcatactgcagagaagaggtgtcgatggacactttagcggcgaatttcttgaagttcagcggcagtttttcagaccacagaatggtcatgttcggttccggagacggacccatggtgtacagggtgttcaggaaacggaagctgtttttggtaaccagggtacgaccgtcgaggcccataccaccgatagattcggttgcccagatcgggtcgccagagaacagttcatcgtattccggagtacgcaggaagcgaaccatacgcagtttcatgaccaggtggtcaaccatttcctgcgcttcttgttcggtgatcttgccagctttcaggtcacgttcgatgtacacatccaggaaggtggaggtacgaccgaaggacattgcagcaccgttctgagacttaacagcagccaggtagccgaagtaagtccactggatagcttcctgagcgttggtagccggaccagagatgtcgtagccgtatttcgcagccatttctttcatctgacccagagcgcggtgctgttcagcgatttcttcgcgcagacggatagtctgttccaggtttacgccgttttccagatcagcctgcagagaagtgaactgtgccagtttgtctttcatcaggtagtcgataccgtacagcgcaacgcgacggtagtcaccgatgatacggccacggccatatgcatctggcagaccggtcagaacaccagatttacggcaacgcaggatgtccggagtgtaaacgtcgaacacgccctggttgtgagttttacggtattcagtgaagatttttttgatcatcggatccagttcgcggttgtacgctttgcaggaaccttcgatcattttgataccaccgaacgggataagagcacgtttcagcggagcttcagtctgcagaccaacgattttctcaagctgcttgttgatgtagccagcgtcgtgagaggtgatggtggaagcaacagcggtgtcaaagtcaactggcgcgtgagtgcggttttccagtttaacgccttccattactttgtcccacagggtggtggtcgcttcagtagcgccagccaggaaggactcgtcaccctcgtacggagtgtagtttttctgaatgaagtcacggacgtttacttcattctgccagtcacctttggtaaaaccttcccaggctgtggctaacttttcattaagctcggacatgtaacacctaccttcttaagtggattttttatttactgcgtacttcgacaaccattaatggtggtcgttttcacgcaggtaaatgacccagtatgtcaacccaaccaacaaaccaccaccgataatgttgccgatcgtaaccggaatcaggttatcagtgatgaaattcatcacggtcaggtgagaaaaattttccggtgcagaaccgactgcggtccaaaattccggggatgcgaagtcgcggattacaatacccatcgggatcataaacatgtttgcgatactgtgctcaaaaccgctggcaacaaacatcgcgaccggcagcaccataatgaacgctttgtccatcaggctgcggccagaataactcatccatactgccagacataccatcaggtttgccaggataccaagacagacggcctcaataaaagtatggtgcactttgtggtcggcggtttgtaggacgtttagtccccattgaccatttgcggtcatatactcgccggaaagccacattaaaagtacaaacagcagtgcgccgaccaggttgccaaaatagacatttagccagtttttcgccaactgaccccaggtgatgcgcccactcgccttagcaacaacaatcaacacggtggaagtaaagagatcggctccgcagacaacacaaagaatcagccccagagagaagcaaatgccgccaaccagttttgccatgccgaagggcattgtgcctgtgccagtggttgctgtgatatagaagacgaatgcgatactgatgaaaacaccggcggtaatcgccagatagaaagtcttaagcggatgtttcgttgctttatagacacccgcctcttcggccactttggccattgcagcaggaagtaaaagatcaaaagggttgtcagctttcacactaactctctctttattaagtcggcgacgagatactaacaaagcattatagatgagaaattgatatagatcatatctcgcctggcttataggcccgtaactcgcatggtttttatgcaaatacggagtaaatatttgattatccaaataaaaataaattttaaaaattaacaaatgagttgaattttttccgcatcctccgctaaaacagttaattaaaagggagcatcaggcgaataaagtaacaatatcgatcgtatttattaaatacaaattaccgatatttaaccttataattacaattattttattaatgcaaatatatgtaaagcggggcattaaaaaaacgccccgtaatataactcagactaatcattaagcctacattgcgtaggctatttgattttattttgcccagaatgctgctttggcgcgctgcagcttttcgtaggccttcaacaagctctgatgtgcagcaaacgcgtgcagatcgctatctaccggttgcaggccgtaaaacgccgcttcgccgctcattgccgcactggcggcttctacggcatctgcgccgtacatgcgaacaaacgcattcagatattgcagcggctggcgatcttcttcctgtgccagtaataacaacgtttgcaggcagcgataatagttggcgcgttccggactaaatacactactgttaaactccatcgtccattcggtccagaccagagcctgttccagatcgccaccagccagcgccagcatggcttttaattcaccgatacgcagggtgtaccaaccgttatcgctcccggtcgccagacccaacagctcacgcacgcgggtaaagtcatcaaaaccttcttcatccagttgctcgatgaggttcaggtaatcttctttttcccactcgctgcctggtaggctaagaatcgtttcacgtaaatggctgcccatactgttattcgcgagccacagatcttcagccggataaatatcggacatgccaggcacgataatacggcaagcataaacgcccagatgctcgtaatcggcaatataaacttctttatcttctttgttgaagatagccatcagtgtggcgaactcttcttccgtggtgccggagaaattccagtccacaaacggataatcggcatcctgcttgaacaggtcccaggagattaaaccgctggaatcgataaagtgcgtttcgaggttggtatgttcagcgacttcttcatcatcgaaggttggcggagtaaacacatccaaatctttcaggccacgaccttgcagcagctcggtcacggtacgttccagtgctacgccaaaatcaggatgcgcaccgaaagaggcaaagcaggtaccgttagcaggattgaacagtaccacgcaaatcaccggatactggccgccaaggctaccgtcataagcgaagattgggaaaccctccgcttccagcgtttcgatggcttcaactactgctgggtaacgcgccagcacgtctgccgggatctctggcaggctgatgctttcagcaataatgcggtttttcacgtagcgttcgaaaacttcagacaatccctgaacgcgtgcttcgttgcgggtattacctgcggacataccgttggagacgtacaggttaccaatgatattcatcggaatataaacggtctgattgtcggactgacgcgtaaacggcaggccgcaaataccacgatcttcgttaccggattgtaggtcaatcagcatgctgccggtcagttcattctccggatcataaaacgcgcgcagacggtcatcgagcagcccttctggcacatcgtcattttcggtcagtgggaaccatttttcgttgggataatgcacgaacggaccgttggcgatggtttcgcccagccagaagtccgcaaaaaagtagttggtactgagacgctcgaaatattcaccgagtgcagaagccagcgccgctttcttggttgcgcctttaccgttggtaaaacacagtgcgcactctttgtcgcgaatatgtacagaccagacgttaggcacgggattcagccaggaggcctcttcaatctgaaagccgaggtcactaagtttttgctggaagcgagcgatggaatcttccagagcggcatctttgccggggataaatgtttgcgtcatgaaaatcactttagtcgtacggaaagcgcgcaataatacgggttttatctcaaaggcgctatcaccgccgccatgccgatgaactgttgactatgcttttagcggataaaccacgttaagagcataaaaatgaaggcgttcgatctccaccgtatggcatttgataaagtgccttttgatttccttggcgaagttgcactacgtagtctttatacctttgtactggtctttttgttcctcaaaatgaccggaagacgcggtgtgcggcagatgagcctgtttgaagttttaatcattctgacgctgggaagtgcggcgggagatgtggcgttttatgatgatgtgccgatggtcccggtacttatcgtctttattactctggcgttgttataccgcctggtaatgtggttgatggcgcacagtgaaaaactggaagatcttctggaaggcaagccagttgtcattattgaagatggcgagctggcctggagcaaactcaataactccaacatgacggaatttgagttctttatggagctacgattgcgtggcgtggagcagctggggcaggtacgtctggcgattctcgaaaccaacgggcaaatcagtgtctatttctttgaagatgacaaggtgaaaccgggtttacttattttacccagtgattgtacgcagcgttacaaagtggtgccggagagcgcggactatgcctgtattcgttgtagtgaaatcattcatatgaaagcgggggaaaaacaattatgtccgcgctgtgcaaatccagaatggacgaaggcaagtcgggcaaaacgggtgacctgacagtaaaaacatcggctttttgctaataatccgagagattcttttgtgtgatgcaagccacatttttgccctcaacggttttactcattgcgatgtgtgtcactgaatgataaaaccgatagccacaggaataatgtattacctgtggtcgcaatcgattgaccgcgggttaatagcaacgcaacgtggtgaggggaaatggctcaaatcttcaattttagttctggtccggcaatgctaccggcagaggtgcttaaacaggctcaacaggaactgcgcgactggaacggtcttggtacgagcgtgatggaagtgagtcaccgtggcaaagagttcattcaggttgcagaggaagccgagaaggattttcgcgatcttcttaatgtcccctccaactacaaggtattattctgccatggcggtggtcgcggtcagtttgctgcggtaccgctgaatattctcggtgataaaaccaccgcagattatgttgatgccggttactgggcggcaagtgccattaaagaagcgaaaaaatactgcacgcctaatgtctttgacgccaaagtgactgttgatggtctgcgcgcggttaagccaatgcgtgaatggcaactctctgataatgctgcttatatgcattattgcccgaatgaaaccatcgatggtatcgccatcgacgaaacgccagacttcggcgcagatgtggtggtcgccgctgacttctctagtaccattctttcccgtccgattgacgtcagccgttatggtgtaatttacgctggcgcgcagaaaaatatcggcccggctggcctgacaatcgtcatcgttcgtgaagatttgctgggcaaagcgaatatcgcgtgtccgagcattctggattattccatcctcaacgataacggctccatgtttaacacgccgccgacatttgcctggtatctatctggtctggtctttaaatggctgaaagcgaacggcggtgtagctgaaatggataaaatcaatcagcaaaaagcagaactgctatatggggtgattgataacagcgatttctaccgcaatgacgtggcgaaagctaaccgtagccggatgaacgtgccgttccagttggcggacagtgcgcttgacaaattgttccttgaagagtcttttgctgctggccttcatgcactgaaaggtcaccgtgtggtcggcggaatgcgcgcttctatttataacgccatgccgctggaaggcgttaaagcgctgacagacttcatggttgagttcgaacgccgtcacggttaatgccgaaattttgcttaatccccacagccagcctgtggggtttttatttctgttgtagagagttgagttcatggaatccctgacgttacaacccatcgctcgtgtcgatggcactattaatctgcccggttccaagagcgtttctaaccgcgctttattgctggcggcattagcacacggcaaaacagtattaaccaatctgctggatagcgatgacgtgcgccatatgctgaatgcattaacagcgttaggggtaagctatacgcttagtgccgatcgtacgcgttgcgaaattatcggtaacggcggtccattacacgcagaaggtgccctggagttgttcctcggtaacgccggaacggcaatgcgtccgctggcggcagctctttgtctgggtagcaatgatattgtgctgaccggtgagccgcgtatgaaagaacgcccgattggtcatctggtggatgcgctgcgcctgggcggggcgaagatcacttacctggaacaagaaaattatccgccgttgcgtttacagggcggctttactggcggcaacgttgacgttgatggctccgtttccagccaattcctcaccgcactgttaatgactgcgcctcttgcgccggaagatacggtgattcgtattaaaggcgatctggtttctaaaccttatatcgacatcacactcaatctgatgaagacgtttggtgttgaaattgaaaatcagcactatcaacaatttgtcgtaaaaggcgggcagtcttatcagtctccgggtacttatttggtcgaaggcgatgcatctagcgcttcttactttctggcagcagcagcaatcaaaggcggcactgtaaaagtgaccggtattggacgtaacagtatgcagggtgatattcgctttgctgatgtgctggaaaaaatgggcgcgaccatttgctggggcgatgattatatttcctgcacgcgtggtgaactgaacgctattgatatggatatgaaccatattcctgatgcggcgatgaccattgccacggcggcgttatttgcaaaaggcaccaccacgctgcgcaatatctataactggcgtgttaaagagaccgatcgcctgtttgcgatggcaacagaactgcgtaaagtcggcgcggaagtggaagaggggcacgattacattcgtatcactcctccggaaaaactgaactttgccgagatcgcgacatacaatgatcaccggatggcgatgtgtttcagcctggtggcgttgagtgatacaccagtgacgattcttgatcccaaatgcacggccaaaacatttccggattatttcgagcagctggcgcggattagccaggcagcctgaatgaacaacgggcaataaatagccaaatctttctttatcaaaacgtcggcacattgtcggcgttttttttcggaccttgtgagtcattttgattaatggtagcgtcgcttgtcaatgtaagttgttgatacataatatttatatatgattaatcaacggatgattcacatgaagaatactaaattactgctggcgattgcgacctctgcagcattactgacagggtgtcaaaatacccacggtattgataccaatatggctatcagctccggtttaaatgcctataaagcagcaacattaagcgatgccgatgcaaaagcgattgccaatcagggctgtgccgaaatggacagcggcaatcaagtcgcaagtaaatccagcaagtacggtaaacgtctggcaaaaatcgccaaagcattgggtaacaatattaatggcacgccggtcaactataaggtttatatgaccagcgacgtcaacgcatgggcgatggcgaacggctgtgttcgtgtctacagtggcctgatggacatgatgaatgacaacgaaattgaaggcgttctgggccatgaactgggccacgtcgcgttgggtcacagcctggctgaaatgaaagcttcttatgcgatcgttgccgcacgcgatgccattagtgctaccagcggtgtggcttcccagctttcccgcagtcaattaggtgatatcgcagaaggcgctatcaatgctaaatactcccgtgataaagagtccgaagcagatgatttctcctttgatctgttgaagaaacgtggcatcagcacccaggggctggttggcagctttgaaacactggctagcctggatggcggtcgcacccagtccatgtttgactctcacccaccaagtacagagcgtgcgcaacacatccgtgatcgtatcgcctctggtaagtaaatcattgtcatctttcgggctggtcttctgccagcccgctataattgcgcaataaatccccatctgaatacagacaaaactggtttttgcacacaacgttaacgatttgtggcgtcggcgcgtataatgcgcgcggttatgttaacggtacgcctgttttaaggagataaagatgacggcaattgccccggttattaccattgatggcccaagcggtgcagggaaaggcaccttgtgtaaggctatggcggaagcgttgcaatggcatctgctggacagcggtgcaatttatcgcgtactggcattggcggcattacatcaccatgttgatgttgcgagcgaagatgcgctggtaccgctggcatcccatctggatgtacgttttgtgagcaccaatggcaatctggaagtgatcctcgaaggggaagatgtcagcggcgaaattcgtactcaggaagtggcgaatgcagctagtcaagtcgcggcattcccacgcgttcgtgaagcattattgcgtcgccaacgcgcgtttcgcgaattaccaggtctgattgccgatggccgcgacatgggaacggtggtattccctgatgcaccagtgaaaattttccttgacgcctccagcgaagaacgtgcgcatcgccgcatgctacagttgcaggagaagggctttagtgttaactttgagcgccttttggccgagatcaaagaacgcgacgaccgcgatcgtaaccgagcggtagcgccactggttccggcagccgatgctttagtgttggattccaccaccttaagcattgagcaagtgattgaaaaagcgctacaatacgcgcgccagaaattggctctcgcataagcgaccgaatttgcagtacccccgttgcaatggaatgacagcgggtatgttaaacaaccccatccggcatggagccaggtggacgttaaatataaacctgaagattaaacatgactgaatcttttgctcaactctttgaagagtccttaaaagaaatcgaaacccgcccgggttctatcgttcgtggcgttgttgttgctatcgacaaagacgtagtactggttgacgctggtctgaaatctgagtccgccatcccggctgagcagttcaaaaacgcccagggcgagctggaaatccaggtaggtgacgaagttgacgttgctctggacgcagtagaagacggcttcggtgaaactctgctgtcccgtgagaaagctaaacgtcacgaagcctggatcacgctggaaaaagcttacgaagatgctgaaactgttaccggtgttatcaacggcaaagttaagggcggcttcactgttgagctgaacggtattcgtgcgttcctgccaggttctctggtagacgttcgtccggtgcgtgacactctgcacctggaaggcaaagagcttgaatttaaagtaatcaagctggatcagaagcgcaacaacgttgttgtttctcgtcgtgccgttatcgaatccgaaaacagcgcagagcgcgatcagctgctggaaaacctgcaggaaggcatggaagttaaaggtatcgttaagaacctcactgactacggtgcattcgttgatctgggcggcgttgacggcctgctgcacatcactgacatggcctggaaacgcgttaagcatccgagcgaaatcgtcaacgtgggcgacgaaatcactgttaaagtgctgaagttcgaccgcgaacgtacccgtgtatccctgggcctgaaacagctgggcgaagatccgtgggtagctatcgctaaacgttatccggaaggtaccaaactgactggtcgcgtgaccaacctgaccgactacggctgcttcgttgaaatcgaagaaggcgttgaaggcctggtacacgtttccgaaatggactggaccaacaaaaacatccacccgtccaaagttgttaacgttggcgatgtagtggaagttatggttctggatatcgacgaagaacgtcgtcgtatctccctgggtctgaaacagtgcaaagctaacccgtggcagcagttcgcggaaacccacaacaagggcgaccgtgttgaaggtaaaatcaagtctatcactgacttcggtatcttcatcggcttggacggcggcatcgacggcctggttcacctgtctgacatctcctggaacgttgcaggcgaagaagcagttcgtgaatacaaaaaaggcgacgaaatcgctgcagttgttctgcaggttgacgcagaacgtgaacgtatctccctgggcgttaaacagctcgcagaagatccgttcaacaactgggttgctctgaacaagaaaggcgctatcgtaaccggtaaagtaactgcagttgacgctaaaggcgcaaccgtagaactggctgacggcgttgaaggttacctgcgtgcttctgaagcatcccgtgaccgcgttgaagacgctaccctggttctgagcgttggcgacgaagttgaagctaaattcaccggcgttgatcgtaaaaaccgcgcaatcagcctgtctgttcgtgcgaaagacgaagctgacgagaaagatgcaatcgcaactgttaacaaacaggaagatgcaaacttctccaacaacgcaatggctgaagctttcaaagcagctaaaggcgagtaattctctgactcttcgggatttttattccgaagtttgttgagtttacttgacagattgcaggtttcgtcctgtaatcaagcactaagggcggctacggccgcccttaatcaatgcagcaacagcagccgcttaatttgcctttaaggaaccggaggaatcatgaccaagagtgaattgatagaaagacttgccacccagcaaagccacattcccgccaagacggttgaagatgcagtaaaagagatgctggagcatatggccagcactcttgcgcagggcgagcgtattgaaatccgcggtttcggcagtttctctttgcactaccgcgcaccacgtaccggacgtaatccgaagactggcgataaagtagaactggaaggaaaatacgttcctcactttaaacttggtaaagaactgcgcgatcgcgccaatatttacggttaagttttttactcaaacttgaacgagagaaaagcacctgtcgggtgcttttttcatttctctaatctggaactggaagctgcctcgcagagttttgaacagttttcaccctttcgttaaattcttctgaatatgcctcggggaacgcaaaattcccaccagacaaccgctcaacaaagttgcacactttccataaacagggaggggtgcatgaaaataacgacagtcggtgtatgcataattagcggaatttttccgttgctgattttgccccaattgcctgggacattaacccttgcgtttctgactctcttcgcctgcgtactggcatttatccctgttaaaaccgtccgttatatcgcgctgacgttgctgtttttcgtttggggcatattaagtgcaaagcaaattttgtgggcaggagaaaccttaactggcgcgacgcaggatgcaattgttgagatcactgcaactgacggcatgaccactcattacggtcaaattactcatctacaaggtcgacgtatattccctgcgagtggtctcgtgatgtatggcgaatatcttccgcaagcggtttgtgctggacaacaatggagtatgaaactcaaagttcgtgcagttcatggccaacttaatgatggcggctttgatagccagcgttatgccattgcccagcatcagccgctcaccggccgttttctgcaggcaagtgtcattgaaccgaattgtagcctgcgtgcacagtatctggcgagtctacaaacaacgctgcaaccctatccgtggaatgcggttattcttggtttaggtatgggggaacggttatccgtccccaaagaaatcaaaaatatcatgcgcgatactggaacggcgcatttaatggcgataagcggattgcacatcgcttttgcggcgttgctggctgccggactcattcgcagtggacaaatttttctgcctgggcgctggatccactggcaaataccattaattggcggaatctgctgtgctgctttttatgcctggttgacgggaatgcaacctcctgcattgcgtaccatggtggcgcttgctacgtggggaatgcttaagttaagtgggcgacagtggagtggctgggatgtatggatatgttgtctggcggcaattttgctgatggatcctgttgccattctcagccaaagtttatggctctctgccgctgcggtcgcggcattgatattttggtatcagtggcttccctgtcctgagtggcaactgccgccggtattgcgtgcagttgtttccctcatccatctgcaactgggaatcacacttctgcttatgcccgtgcaaatcgtcatatttcatggcattagtctgaccagctttattgcaaatctattagcaattcccttggtgacatttatcacggttccgttgatcctcgccgcgatggttgtgcatttaagcgggccgttaatcctggagcaagggttatggtttcttgccgaccggtctttggctttacttttctgggggttaaagagtttgccggaagggtggatcaacattgctgaatgttggcaatggctaagtttttccccatggttcttactggtggtatggcgattaaacgcctggcgaacgttgccagcaatgtgtgtggctggaggcttgctgatgtgctggccgctgtggcaaaaacctcgacctgacgagtggcagctgtacatgcttgatgtcgggcaagggctggcaatggtgatagccagaaacggcaaagcgattctctatgacacaggactggcctggcctgaaggggatagtgggcaacaactgattatcccctggctccactggcataatcttgaaccggaaggcgttattctgagccatgaacatctggatcaccggggagggctggatagtatattgcatatatggccgatgttatggatcagaagtccgttaaactgggaacatcatcagccctgtgtgcgtggcgaagcgtggcaatggcaaggattgcgtttcagcgcgcactggcctttacaaggtagcaacgataaaggaaataaccattcctgtgtggttaaggttgatgacgggacgaatagcattcttctaaccggtgatattgaagccccagctgaacaaaagatgctaagccgttactggcagcaagtgcaggcaacattgcttcaggtacctcaccatggcagtaataccagtagtagcttgccattaattcagcgagtgaatggaaaagtggcactcgcaagcgcaagccgctataacgcatggcgactgccctctaacaaagttaagcatcgctatcaactgcaaggatatcaatggattgatactccacatcaaggtcaaacaacggtcaattttagtgcgcaaggctggcggattagcagcctcagggagcaaattttacctcgttggtatcatcagtggtttggcgtgccagtggataacgggtaaaatatgcggctatttcaacaaatgctggttttttgaatgcataacgacaaagatctctctacgtggcagacattccgccgactgtggccaaccattgcgcctttcaaagcgggtctgatcgtggcgggcgtagcgttaatcctcaacgcagccagcgataccttcatgttaagcctccttaagccacttcttgatgatggctttggtaaaacagatcgctccgtgctggtgtggatgccgctggtggtgatcgggctgatgattttacgtggtatcaccagctatgtctccagctactgtatctcctgggtaagtggaaaggtggtaatgaccatgcgtcgccgcctgtttggtcacatgatgggaatgccagttagtttctttgacaaacagagtacgggtacgctgttgagtcgtattacctacgattccgaacaggttgcttcttcttcttccggcgcactgattactgttgtgcgtgaaggtgcgagcatcatcggcctgttcatcatgatgttctattacagttggcaactgagcatcattttgattgtgctggcaccgattgttagcattgcgattcgcgttgtaagcaagcgttttcgcaacatcagtaaaaacatgcagaacaccatggggcaggtgaccaccagcgcagaacaaatgctgaagggccacaaagaagtattgattttcggtggtcaggaagtggaaacgaaacgctttgataaagtcagcaaccgaatgcgtcttcaggggatgaaaatggttagtgcctcttccatctctgatccgatcattcagctgatcgcctctttggcgctggcgtttgttctgtatgcggcgagcttcccaagtgtcatggatagcctgactgccggtacgattaccgttgttttctctagtatgattgcactgatgcgtccgctgaaaagcctgaccaacgttaacgcccagttccagcgcggtatggcggcttgtcagacgctgtttaccattctggacagtgagcaggagaaagatgaaggtaagcgcgtgatcgagcgtgcgactggcgacgtggaattccgcaatgtcacctttacttatccgggacgtgacgtacctgcattgcgtaacatcaacctgaaaattccggcagggaagacggttgctctggttggacgctctggtagcggtaaaagtaccatcgccagcctgatcacgcgtttttacgatattgatgaaggcgaaatcctgatggatggtcacgatctgcgcgagtataccctggcgagcttacgtaaccaggttgctctggtgagccagaatgtccatctgtttaacgatacggttgctaacaacattgcttacgcacggactgaacagtacagccgtgagcaaattgaagaagcggcgcgtatggcctacgccatggacttcatcaataagatggataacggtctcgatacagtgattggtgaaaacggcgtgctgctctctggcggtcagcgtcagcgtattgctatcgctcgagccttgttgcgtgatagcccgattctgattctggacgaagctaccagcgctctggataccgaatccgaacgtgcgattcaggcggcactggatgagttgcagaaaaaccgtacctctctggtgattgcccaccgcttgtctaccattgaaaaggcagacgaaatcgtggtcgtcgaggatggtgtcattgtggaacgcggtacgcataacgatttgcttgagcaccgcggcgtttacgcgcaacttcacaaaatgcagtttggccaatgatcgaaaaaatctggtctggtgaatcccctttgtggcggctattgctgccactctcctggttgtatggcctggtgagtggcgcgatccgtctttgctataaactaaaactgaagcgcgcctggcgtgcccccgtaccggttgtcgtggttggtaatctcaccgcaggcggcaacggaaaaaccccggtcgttgtctggctggtggaacagttgcaacagcgcggtattcgcgtgggggtcgtaagccggggatatggtggtaaggctgaatcttatccgctgttattgagcgcagataccacaacagcacaggcgggtgatgaacctgtgttgatttatcaacgcactgatgcgcctgttgcggtttctcccgttcgttctgatgcggtaaaagccattctggcgcaacaccctgatgtgcagatcatcgtaaccgacgacggtttacagcattaccgtctggcgcgtgatgtggaaattgtcgttattgatggtgtgcgtcgctttggcaatggctggtggttgccggcggggccaatgcgtgagcgagcggggcgcttaaagagcgttgatgcggtaatcgtcaacggcggtgtccctcgcagcggtgaaatccccatgcatctgctgccgggtcaggcggtgaatttacgtaccggtacgcgttgtgacgttgctcagcttgaacatgtagtggcgatggcggggattgggcatccgccgcgcttttttgccacgctgaagatgtgtggcgtacaaccggaaaaatgtgtaccgctggccgatcatcagtctttgaaccatgcggatgtcagtgcgttggtaagcgccgggcaaacgctggtaatgactgaaaaagatgcggtgaaatgccgggcctttgcagaagaaaattggtggtatttgcctgtagacgcacagcttagtggtgatgaaccagcgaaactgcttacgcaactaaccttgctggcttctggcaactaattacgccgcggcagcgttcgattgatggagtcatgaatgagcctgccgcacctctcccttgctgatgcgcgtaatcttcaccttgccgcacaaggcctgttaaacaaaccccgccgtcgagcgagcttggaggatattccggcaacgatctcccgcatgtccttgctgcaaatcgataccatcaatattgttgcccgtagtccatatctggtgcttttcagtcgtctgggaaattatcctgcccagtggctggatgagtctctggcgcgtggcgaattaatggaatactgggcgcatgaagcctgctttatgccgcgtagcgactttcgtcttattcgccaccgcatgctggcacctgaaaaaatgggctggaaatacaaagacgcctggatgcaggaacatgaggcggaaattgcacagttaattcagcatattcatgataaggggccggtacgtagtgccgattttgagcatcctcgtaaaggtgcaagcggctggtgggaatggaagccgcataaacggcatctggaaggtttatttactgccggaaaggtgatggtgattgaacggcgcaacttccagcgcgtttatgatttaacccaccgtgtcatgcctgactgggatgatgagcgcgatctcgttagccaaacagaagcagaaatcatcatgctggataacagtgcgcgtagcctgggaatattccgcgaacagtggctggcagattactatcggctgaaacgtccggcactggcggcgtggcgcgaagcgagggctgaacagcagcaaatcattgctgtgcatgttgaaaaattgggcaatctttggctgcatgatgatttgctgccgctactcgagcgagcgctggccggaaagctcactgcaacgcacagcgcggtacttagcccttttgatcctgttgtctgggatcgcaaacgcgcagagcagctttttgattttagctaccggctggagtgctataccccagcgccgaaacgccagtatggctattttgttctgccgttattacatcgtgggcaattagttgggcgaatggatgccaaaatgcatcgccagacaggcatccttgaagttatctctctgtggttacaggaaggtattaaaccaacgacaacgctgcaaaaagggctacgtcaggcgattactgatttcgctaactggcagcaggcaacgcgggtgacattaggatgctgcccgcaaggcctctttactgattgccgcaccggctgggaaatagaccccgtcgcataaatgattatgataagatttatgcattcataacccgatccatctggaggaactatggatcatcgtctgcttgaaatcattgcctgcccggtttgcaacggaaaactttggtataaccaggaaaaacaagagcttatttgcaaactggacaacctcgctttcccgctgcgtgatggcattccagtgttgctggaaacggaagcccgcgtgctgactgctgatgagagtaaaagttgatgtaaactgctgatgagagtaaatcatgagttttgtggtcattattcccgcgcgctacgcgtccacgcgtctgcccggtaaaccattggttgatattaacggcaaacccatgattgttcatgttcttgaacgcgcgcgtgaaagtggtgccgagcgcatcatcgtggcaaccgatcatgaggatgttgcccgcgccgttgaagccgctggcggtgaagtatgtatgacgcgcgccgatcatcagagtggaacagaacgtctggcggaagttgtcgaaaaatgcgcattcagcgacgacacggtgatcgttaatgtgcagggtgatgaaccgatgatccctgcgacaatcattcgtcaggttgctgataacctcgctcagcgtcaggtgggtatggcgactctggcggtgccaatccacaatgcggaagaagcgtttaacccgaatgcggtgaaagtggttctcgacgctgaagggtatgcactgtacttctctcgcgccaccattccttgggatcgtgatcgttttgcagaaggccttgaaaccgttggcgataacttcctgcgtcatcttggtatttatggctaccgtgcaggctttatccgtcgttacgtcaactggcagccaagtccgttagaacacatcgaaatgttagagcagcttcgtgttctgtggtacggcgaaaaaatccatgttgctgttgctcaggaagttcctggcacaggtgtggatacccctgaagatcttgagcgcgttcgcgctgaaatgcgctaatttcacttcacgacacttcagccaattttgggaggagtgtcgtaccgttacgattttcctcaatttttcttttcaacaattgatctcattcaggtgacatcttttatattggcgctcattatgaaagcagtagcttttatgagggtaatctgaatggaacagctgcgtgccgaattaagccatttactgggcgaaaaactcagtcgtattgagtgcgtcaatgaaaaagcggatacggcgttgtgggctttgtatgacagccagggaaacccaatgccgttaatggcaagaagctttagtacgcccggaaaagcccgacaactggcatggaaaaccaccatgctggcaagaagtgggactgtccgtatgccgactatttatggtgtgatgacgcatgaagaacaccccggccccgatgtcctgctactggagcggatgcgtggtgttagcgtggaggcaccagcccgaacaccagaacgctgggaacaactcaaagaccaaatcgttgaagccttactggcctggcaccgtcaggacagtcgcggttgcgtcggcgcggtcgacaatactcaggaaaatttctggcccagttggtaccggcaacatgttgaagtgctatggaccacgctcaatcagttcaataacaccggtctgacgatgcaggataagcggatcctgtttcgcactcgcgaatgtctcccggcattatttgaaggctttaacgacaattgtgtgctgattcacggtaacttctgtttacgcagcatgttgaaagatagccgcagcgatcagttactggcgatggtcgggccgggactaatgctttgggcaccgcgagaatacgaactgttccgactaatggataattctctggcggaagatttgctctggagttacctgcaacgcgcgccagtggcggagagcttcatctggcggcgttggttgtatgtgttatgggatgaagttgcgcaactggttaataccggacgatttagtcggcgcaacttcgatctggcaagtaaaagtctcttgccgtggctcgcctgatcactcttgccgtggctcgccactgctaccttttagccactgccagatacggccaagcgtttcatagccaacacgatcgctatgcatcaaccagaccggagaagggattgcccgttcccacgggttaagcgggctgtcgatggccaactgattcgccggggctggtagcggatttaacccttcctgctgaaaaaagatcatcgcccgcggcagatgacttgcggaggtcaccagcaggaaaggggcgtcaccaatcgcctgtttcactgctgcagcttcttcttcggtatcttttggcaaatccagggtgataatttgctcgcgcggcacgcccaggctttgcgcaactctggcacctacttccgctgtactcaccgtattggtttttgctacgcctcccgtgaagatcagtttacttcccggattttcgcgccataagcgaataccttcattcaggcgtggcagactgttattgattaaattagagctcggtgcccactgcgggttccaggtataaccacctccgagcaccacgatatagtccactttttggctattattccatgtcggataggtgctttcgatgggacgcagcaggcggtcggctaccggttgcaaactcaataacaagagcgccagccacccaatgctaataaaaatcttcccggttttttgaaaacggctaaaccacagcagcgccaggccagcgccaataatcaacaacatcagcggaagtggcagcaacatattgccaatcacttttttcagtgtaaaaagcatcctttctggttccttttttaaccatatagcaagggatcgccagcgatattacaccagacgggttcattctcgccgtggctgtgacaaaatagcgtctttatcagaaaacgtcttagccaaccggtggagaaagcaatgcaggatcgcaattttgatgatattgcggaaaagttttcccgtaacatttacggcaccaccaaagggcagcttcgacaggctattctgtggcaggatctcgatcgcgtgctggcggaaatgggcccgcaaaaactgcgtgtgctggatgctggcggtggagaagggcagaccgcaatcaaaatggccgagcgtgggcatcaggtcattttatgcgatctttctgcgcagatgatcgaccgcgcaaaacaggcggcagaagcaaaaggtgtgagcgacaacatgcaatttatacattgcgccgctcaggatgttgctagccatttggaaacgcccgttgatctgatattgttccatgcggtgctcgagtgggtggctgatccccgcagcgtattgcagaccctctggagtgtgttgcgtccaggcggcgtgttgagcttaatgttctacaatgcgcatggtttgttgatgcataacatggtcgccgggaattttgattacgtgcaggcgggaatgccgaaaaagaaaaaacggacgcttagcccagattatccacgcgacccggcgcaggtttatctgtggctggaagaagctggttggcaaattatgggtaagacaggcgttcgcgtgtttcatgattatctgcgcgagaaacaccagcagcgcgactgctatgaagcattacttgaattagaaacgcgttattgccgtcaggaaccgtatattaccctggggcgttatattcatgtcaccgcgcgcaaaccgcagagcaaggataaagtatgagtgaattttcccagacagtccccgaactggttgcctgggccagaaaaaatgacttctccatcagcctgccggtagaccgactctcttttctgctggcggttgccacgctgaacggcgagcgtctggatggtgagatgagtgaaggcgagctggtggatgcattccgccatgtgagtgatgcgtttgagcaaaccagcgaaaccatcggcgtgcgcgccaataacgcgatcaacgacatggtgcgtcaacgtctgctgaaccgctttaccagcgagcaggcggaagggaacgcaatttaccgtctgacgccgctcggcatcggcattactgactactacatccgtcagcgcgagttttctacgctgcgtctttctatgcagttgagcattgtggcgggtgagctcaaacgcgcagcagatgccgccgaagagggcggtgatgaatttcactggcaccgtaatgtctatgcgccactgaaatatagcgtagcagaaattttcgacagtatcgacctgacgcaacgtctgatggacgaacagcagcagcaggtgaaggacgatatcgcccagttgctgaacaaagactggcgggcggcgatttccagctgtgaattgttgcttagcgaaacttccggaacgctgcgtgaattgcaggatacgctggaagcggcaggcgacaaattgcaggctaatctgttgcgcattcaggatgcgacgatgacccatgacgatctgcatttcgtcgatcgtctggtgttcgatctgcagagcaaactcgatcgtattatcagttggggccagcaatccatcgacttgtggattggctacgaccgccacgtacacaaatttattcgtaccgcgatcgatatggataaaaaccgcgtctttgctcagcggttacgtcagagcgtacaaacctattttgatgagccgtgggcgctaacttatgccaatgccgatcgtctgctggatatgcgtgacgaagagatggcactgcgcgatgaagaagtgactggggaacttcctgaggatctggaatacgaagagtttaacgagatccgcgaacagctggcggcgatcatcgaagaacaacttgccgtgtacaaaaccagacaagtgccgctggatcttggtctggtggtacgcgaatatctgagtcagtatccgcgtgcacgtcactttgacgttgcgcgtattgttattgatcaggcggtacgtcttggcgtagcgcaagcagatttcaccggactgccagcgaaatggcagccgattaatgattacggagccaaggtacaggcgcatgtcatcgacaaatattgaacaagtgatgccggttaagctggcgcaggcgctggcgaatccgttatttccggcgctggacagcgccttacgtagtggacgccatattggcctcgacgaactggataatcatgcattcctgatggattttcaggaatatctggaagagttttacgcgcgttataacgttgagcttattcgcgcaccagaagggttcttctatttacgcccacgttccaccacgctgatccctcgttccgtcttgagcgaactggatatgatggtcgggaaaatcctctgttatctctatctcagcccggaacggctggcgaatgaggggattttcacccagcaggaactgtacgacgaactgctcaccctggccgatgaagcaaaactgctgaaactggtgaacaaccgtagtaccggtagtgacgttgaccgtcagaagttgcaggagaaagtacgttctagcctcaaccgtctgcgtcgtttaggcatggtgtggtttatgggccacgacagcagcaagtttcgcattaccgaaagcgtgttccgcttcggagccgatgtgcgtgctggcgacgatccccgtgaagcacagcgtcgcctgattcgtgatggcgaagcaatgccgattgaaaatcatctgcaactcaacgatgaaaccgaagagaatcagccagatagcggagaggaagaataatgattgaacgcggtaaatttcgcagtctgacgctgattaactggaacggcttttttgcccgaacttttgaccttgacgagctggtcacgacgctttctggcggtaacggggcgggtaaatccaccaccatggcggcgttcgttacggcgctgatccccgacctgaccctgctgcatttccgtaacactacggaagccggggccaccagcggtagccgcgataaaggtctgcacggtaagctgaaagcgggtgtctgttatagcatgctcgacaccattaacagccgccaccagcgcgtggtggtcggtgtgcgtctgcaacaggttgccggacgcgatcgtaaagtggatatcaagccgtttgccattcagggactgccgatgagcgtgcagccgacacagctggtgaccgaaaccctgaacgaacgccaggcgcgcgtgctgccgcttaacgagctgaaagacaagctcgaggcgatggaaggcgtgcagtttaaacagttcaactccattactgattaccacagcctgatgttcgatctgggcatcatcgcgcgtcgtctgcgctccgcatctgaccgtagcaaattctatcgtctgatcgaagctagcctgtatggcgggatctccagtgccattacccgttctctgcgcgactacctgttgccagaaaacagcggcgtgcgtaaagcgttccaggacatggaagcggcgctgcgtgaaaaccgtatgacgctggaagcgattcgtgtcacccagagcgaccgcgacctgtttaagcatctgatcagcgaagccaccaactacgtggcggcggactacatgcgtcacgccaacgagcgccgtgtccatctcgacaaagccctggagtttcgtcgcgagctacatactagccgtcagcaactggcggctgagcagtacaaacacgtcgatatggcgcgtgagctggcagagcacaacggtgccgaaggcgatctggaagcggattatcaggcggccagtgatcacctgaacctggtgcaaaccgcactgcgtcagcaggagaagatcgaacgctacgaagcggatctcgatgagctgcagatccgtctggaagagcaaaatgaagtggtggcagaagccatcgaacgccagcaagagaatgaggctcgtgcggaagctgccgaactggaagtggacgagctgaaaagccagcttgctgactaccagcaggcgctggacgtccagcaaacgcgcgcgatccagtataaccaggcgattgctgcgcttaatcgtgccaaagaactgtgccatctgccggacttaaccgccgactgcgccgccgaatggctggaaaccttccaggcgaaagagctggaagcgactgaaaaaatgctctctcttgagcagaaaatgagcatggcgcaaaccgcgcacagccagtttgagcaggcttatcagctggtggtggcaatcaacggcccactggcgcgtaacgaggcgtgggatgtcgctcgcgaactattgcgcgaaggggtcgatcagcgtcacctggcagagcaggttcagccgctgcggatgcgattaagcgaactggaacagcgtctacgcgagcagcaagaagctgagcgtctgctggcagatttctgcaaacgtcagggcaagaattttgatatcgacgaactggaagccctgcatcaggaactggaagcacgcattgcctctctttccgatagcgtgtctaacgcccgtgaagagcgcatggcactgcgccaggagcaggaacagctgcagtctcgcattcagagtttgatgcagcgtgcgccggtttggctggcagcgcaaaacagtctcaaccagttgagcgaacagtgcggcgaagagtttacctccagccaggacgtcaccgaatatctgcaacagttgctggagcgtgagcgagaggcgattgttgaacgcgatgaagtgggcgcgcgcaaaaacgccgtcgatgaagagatcgaacgtttaagccagcctggcggctctgaagatcagcgtctgaacgcgctggcggagcgttttggtggtgtgctgctgagtgaaatttatgacgacgttagcctggaagatgcgccgtacttcagtgcgctgtatggcccgagtcgccacgccatcgtggtgccagatctgagtcaggtaactgaacacctggaaggcttgaccgattgcccggaagatctctatctgatcgaaggagatccgcagagtttcgatgacagcgtgttcagcgttgatgagctggaaaaagcggtagtggtgaaaatcgccgatcgtcagtggcgttatagtcgtttcccggaagtgccgctgtttggtcgtgctgcgcgtgaaagccgtattgaaagcctccatgccgagcgtgaagtgctttccgaacgcttcgccacgctctcctttgatgtacagaaaactcagcgtctgcatcaggcgttcagccgctttatcggcagtcatctggcggttgcgtttgagtctgacccggaagcagaaatccgtcaactgaacagccgtcgcgtcgaactggagcgggcgttaagtaatcatgaaaatgataaccagcagcagcgtattcagtttgagcaggcgaaagagggcgttacggcgctgaaccgcattctgccgcgtctcaacctgttggctgatgacagcctggcggatcgcgtcgatgaaatccgcgaacgtctggatgaagcccaggaagccgcgcgttttgttcagcagtttggcaatcaactggcgaaactggaaccgattgttagcgtattgcagagcgacccggaacagttcgaacagttaaaagaagattacgcgtactctcagcagatgcagcgcgatgcccgtcagcaggcgtttgccctgacggaagtggtgcagcgtcgtgcgcactttagctattctgacagcgcagaaatgcttagcggtaacagcgatctcaacgaaaaactgcgtgaacgtctggaacaggcggaagcggagcgtacccgcgctcgcgaagcgttgcgcggtcacgcagcgcagttgagtcagtacaaccaggtgctggctagcctgaaaagttcttacgacaccaaaaaagagctactcaacgatctgcaacgtgaattgcaggatatcggcgtgcgtgctgatagcggggcagaagagcgggcgcgtattcgccgtgacgagctgcatgcgcaactgagcaataaccgtagtcgccgcaatcaactggaaaaagcgcttaccttctgcgaagcggagatggacaacctgacccgcaaactgcgcaagctggagcgggattactttgagatgcgcgagcaggtagtgaccgccaaagcgggctggtgtgcggtgatgcgcatggtgaaagataacggcgttgagcgccgcttacaccgtcgtgagctggcttatctctccgctgatgatttgcgttccatgagcgataaggcgttaggtgcgctgcgtctggcggtggcggataacgaacatctgcgcgacgtgctgcgcatgagcgaagatccgaaacgtccggagcgtaaaattcagttcttcgtggcggtttatcagcatctgcgtgaacgtattcgtcaggatattattcgtaccgatgatccggtggaagctatcgaacagatggagattgaacttagccgtctgaccgaagaattaacctcccgtgaacagaaactggcgatcagttcccgcagcgtggcgaacatcattcgcaaaaccattcagcgcgagcagaaccgtatccgtatgctcaaccaggggttgcagaacgtaagctttggtcaggtgaacagcgtgcgtctcaacgtgaacgtgcgtgaaacgcacgccatgctactggatgtgctctctgaacagcacgagcagcatcaggatctgtttaacagcaaccgtttgaccttcagcgaagcgctggcgaaactgtatcaacgtcttaacccgcagattgatatggggcagcgcacgccgcagaccatcggtgaagaactgctggattaccgcaactatctggaaatggaagttgaggttaaccgtggttccgatggctggctgcgcgcagagtctggtgcattgagcaccggtgaggcgattggtaccggtatgagcattctggtgatggtggtacaaagctgggaagatgaatctcgccgcctgcgcggtaaagatatctctccttgccgcctgctgttcctcgatgaagcagcgcgactggatgctcgttctatcgccacgctgtttgaattgtgtgagcgtttgcaaatgcaactcatcatcgcagcgccggaaaatatcagcccggagaaaggcaccacctataaactggtgcgtaaagtcttccagaataccgaacacgttcatgtcgtcggcctgcgaggatttgcgccgcaactccctgaaacgcttccaggaactgacgaagcgccttctcaggcgagttaaaattaaggcggcagcaatgccgccttttctttttccgaaaactccgtttctgcactaaaaaagtggcacattacggcgcgcttttctttaaacttctttacattaggttatgtaaaaacgtatcggcgtttatatactgaagataagcctgatgagtaacaggcttgctcgtcatactttcgtgagtattggcgttgtacaggcaagtcgtaaaataacagcctggctattcagagtatgataaaaacagggggcaagggatgttgcttaatatgatgtgtggtcgtcagctgagcgcaatcagtttgtgcctggccgtaacattcgctccactgttcaatgcgcaggccgatgagcctgaagtaatccctggcgacagcccggtggctgtcagtgaacagggcgaggcactgccgcaggcgcaagccacggcaataatggcggggatccagccattgcctgaaggtgcggcagaaaaagcccgcacgcaaatcgaatctcaattacccgcaggttacaagccggtttatcttaaccagcttcaactgttgtatgccgcacgcgatatgcaacccatgtgggaaaaccgtgatgctgttaaagccttccagcaacagctggcagaggtggcgattgccggtttccagccgcagtttaataaatgggtagagttactgaccgatcctggtgttaacgggatggcacgcgacgtggtgctctctgatgcgatgatgggctatctccatttcattgcaaatattccggtcaaaggcactcgctggctatatagcagtaaaccttatgcacttgcaacgccgccgctcagcgtgattaaccaatggcagctggcgctggataaaggtcaattgcctacgtttgttgcaggactggcaccgcagcatccgcaatatgcggcgatgcatgaaagcttactggccttactctgtgacaccaaaccgtggccccaactgaccggcaaagcaacgttgcgcccagggcagtggagtaacgacgtaccggcgttgcgcgaaatattgcaacgcacaggcatgttggacggggggccgaaaattactctacctggcgatgacacgccaactgacgcggtagtcagcccatccgctgttactgttgaaacagcagaaactaagccgatggataagcaaacgacgtctcgtagtaaacctgcgcctgccgttcgcgccgcctacgataatgaactggtggaagccgttaaacgttttcaggcatggcaaggattgggggcagatggtgctattggcccggcaacacgtgactggttaaacgtaacgcccgcccagcgtgctggtgtgttggctctcaacatccagcgattgcgcttgctgccaacagagctttctaccgggatcatggttaacattccggcctatagcctggtctactatcagaacggcaatcaggtgctggatagccgagtcattgtcggtcgccccgatcgcaaaacgccgatgatgagcagtgcccttaacaacgtagtggtaaacccgccgtggaacgtacctccaactctggcacgcaaagatattctgccaaaagtgcgcaacgatccgggatatctcgaaagccatggctatacggtgatgcgcggctggaacagcagagaagcgattgacccatggcaggttgactggtctacaatcacggccagcaatttaccgttccgcttccagcaggctccaggcccacggaacagcctggggcgctataaattcaatatgccgagtagtgaggccatttatttgcatgacacgccgaaccacaatctgttcaagcgtgatacacgcgcattgagcagtggctgtgtacgagtgaataaagcttccgatctggcgaatatgctgttgcaggatgcaggctggaatgacaaacgtatttctgatgcgctgaagcagggtgatacacgttacgtcaatattcggcagagcattccggtgaatctctactacctgacggcctttgttggtgcagatggtcgtacccagtatcgtacagatatttacaattatgatctgcctgcgcgatccagcagccaaatcgtaagcaaagcggaacaattaatcaggtaaatgaagtagttcggggaaatcagttgtcgtaataattagcatgattgggggcgattctctgcagcccccgtcactgctggggttgagtcatcttgacgtctgctttacgggcggttaaggtgcctcttgtgcgccagaagtgcatataaacgataacattgacctgtagacttgattatcatggacaaattcgacgctaatcgccgcaaattgctggcgcttggtggcgttgcactcggtgccgccatcctgccgacccctgcgtttgcaacactctctaccccacgcccgcgcattttgacactcaataatcttcataccggagagagtatcaaagcggagtttttcgatggcagaggctatattcaggaagaattggcaaaacttaaccattttttccgcgattaccgcgcgaacaaaataaagtccatcgacccaggattattcgaccagttgtatcgcctgcaagggttgttaggcacgcgcaaaccggtgcaactcatttccggttatcgttctattgataccaacaatgaactacgcgcccgcagccgtggagtagcgaagaaaagctatcacactaaaggccaggcgatggatttccatattgaaggtatcgcgttaagcaatattcgcaaagccgcgttatctatgcgcgcaggtggtgtaggatattatccacgtagtaactttgtgcatattgataccgggccagcacggcactggtaataattgcttaacgaaacaggggcagtatgaactatcgtattattccggtcaccgcattctcccagaactgtagtttaatctggtgtgaacaaacccgtctggccgcactggtcgatcctggcggcgatgcggaaaaaatcaaacaggaagttgatgacagcggcctgacactgatgcagatcctgctgacgcatggtcatctggaccacgttggcgcagcggcggaactggcgcaacattacggcgtgccggttttcggcccggaaaaagaagatgagttctggctgcaaggcttgcctgcgcaaagtcgtatgtttggtctggaagagtgccagccgctgacgccagatcgttggctgaacgaaggcgataccatcagcatagggaatgtgactttacaggtgttacattgccctgggcatacgccgggtcatgtcgtgttttttgatgatcgggcaaagctgctgatttctggcgatgttattttcaaaggcggagtagggcgcagtgacttcccgcgtggcgatcataatcaactgatttctagtatcaaagataaattgctgccactgggggatgacgtgatatttattccgggtcacggaccattatccacacttggttatgaacgcctgcataatcccttcctgcaagacgaaatgcccgtctggtaaggcacataaaaaagcccgcttttaatgctggcctggatttctggcaaagtgcgctttgtttatgccggatgcggcacgagcgccttatccggcctacaaaatcgtgcaaattcaaaatattgcaggggacgcgtaggcctgataagcgtagcgcatcaggcaatgttgcgtttgtcatcagtctcagcccgcttttcagcgggcttcattgtttttaatgcttacagcactgccacaatcgcttcgcacagcggagccatgttatctggtgtcatcccggccacatttacgcgaccagaagcaaccgcatatacgccaaactcttcgcgcagacgcagcacttgttcttttgtcaggccactgaaggagaacatgccgttctgtttgatgataaagctgaagtcgcggtttgcgcctttttcctgcagcgtattgacgaacaactgacgcatacgctgaatacgctggcgcatatcagtcagctcttgttcccaaatcgcacgtaacgcatcgttgctcaggatggtggcaacaacagaagcgccgtgtgctggtgggttagagtagttagcgcgaatcgccgctttcatttggctgaatgcgcgatcaacggtttcactgtcggcagcaaccagagtacaagcgccaacacgctcgttgtacaggccaaagtttttagagtaggaactggcaacaatcagctctttatgcatagccgcgaaagcgcgcagtccttcagcatcttcttccagaccacgggcaaaaccctggtaagcgaagtcaaacagcggtaaccagcctttctcaacggagagttgtgccagtgtttgccattgttccagcgtagggtcgataccggttgggttatggcagcagccatggaacagcactacgtcgccagcctgagcttcattcaggctgttaatcagtgcatcgaagtcaagagtgtgattttccgcatcataataagcgtattcacgaacttccagacctgcagagttaaagacgctcttatggttcggccagcttgggttgctcacccacacacgcttaacgctggtattttttgccaggaaatcggcagccacgcgtagtgcgccagtgccccccggagtctgtgccgtgcgagcacgtttgtcattgatcagggcgctacctttaccaaacagcagttcctgagtgcagcgaccaaattcagggatgccgtcaatgccgaggtaatttttggtggtttcattttcgagcagatactgttcagcctttttcacgctggtcagtaccggggttttgcccgtctcatctttatagacaccaatcccgaggttaattttgccgggacgttcatcggcacgaaacagatcggccaggcccagaatcgggtcggcaggagcggcggtaatgttctcaaacatgacgaggttccattatggttacagaagggaagtccgctatcagggtaacgggagatttacaaaattccaactattactgatgaaaacgcaggctgtttttgcaagacgtgagattgctctggaaggtataaaaaaaacaggaccaaagtcctgttttttcggcatttaacaaagaggtgtgctattagaactggtaaacgatacccacagcaacggtgtcgtcactacctacgcccagtttgttgtcagaatcgatctggttgatgatgtagtcaacataggtggacatgtttttgttgaagtagtaggttgcgcccacttcaaagtagttcaccagatcaacatcaccgataccttctacgtctttcgctttagatttggtgtaagcgatggacggacgcagaccgaaatcgaactggtattgcgcaactaacagaacgtcttgcgttttgttggcgaagccgctggtgtttgtaaatttattagtgatcggcgtagcgttacgggtttcaccgtagttcgctgccaggtagatgttgttcgcgtcgtacttcagaccagtagcccactgttcagcttttttaccgttgccaagaggttgagcttcttgcaggttggtacggtcagctgcaccataagcaccaacgataccaaagccttcgtattcgtagctgatagaaccgccaacaccgtcgccgttagaacggcgtgcagtgtcacgctcgtttttacccaggtactgaacagcgaagttcaggccatcaaccagaccaaagaagttggagttacgataggtagcaacgccgccaacacgaccaacgaagaagtcatcgctgtatgcagtatcaccaccaaattctggcagcatatcggtgtaacccagtgcatcataaaccacaccgtagttacggccgtaatcgaaagaaccaacgtcagcgtatttaagacccgcgaatgccagacgcgttttgttaccagtttgagcgtcagcgccttcagagttgttaccctggaagttatattcccactgaccataaccggtcagatcggaattgatttgagtttcccctttaaaaccaagacgggcataggtcatgtcgccattgccaccgtaactgttttcaccgttacccttggaaaaataatgcagaccaacagctttaccgtacagatctactttgttgccatctttgttatagatttctgcagcgtttgcagtacctgctactaacagagcagggacgatcactgccagaatattgcgcttcatcattatttattaccctcatggttttttttatgacacctgccactgccgtcaataagttctgtcaataaaaatttacggaactattgatgagagtttggtgtctttatgtgtctgcaggcatctttccattcaaactaacgtttcgctaccgtgaaagtgctacaaagataaagatttggtttcaaaaagaaaaaatatgtaaccaaaagtaaaatttaaggaactttgtgaacaccgtcatatttccatagagacgtgatgatatttacagcaattttaatctatttatatgatttccttatatttaaattaactaaacggaaattttgtttctgatggaaactttatcgacctggcacaaaatcttctttcagacatccagaatgccaaaaaatagtatgaaaattgtgctattagctaagaaaaaactaatccgcaataagaatgcggattagtttttgcgcgtaaatgttgcaatgtaatattccgtaacaggatgatcgttatggcggggttgcaaatagattgcttgacttaacaaacagataacttgacagaaaagataaaaaaagagccagcgggcgctggctcttgaagacgctaaattagaagctggcgttacgcggagtacgtgggaacggaatcacatcacgtacgttttgcacgccagttacgtaagcaatcagacgttcaaaaccaagaccgaaaccactatgcggaacagtaccgtagcgacgcagatcgcgataccaccagtaatcttctttattcaggcccatttccagcatacgctcgtccagcacgtccagacgttcttcacgctgggagccaccaatgatctcaccgatgcccggagccagaacgtccatagccgcaacggttttaccgtcttcgttaaggcgcatatagaacgctttaatatctttcggatagtttttaaccactaccggtgctttaaagtgttcttccgccagataacgctcatgctcagaagagagatcgactccccagtaaaccgggttttcaaacttcctgccgcagttttcgagaatggtcactgcgtcggtataatccacctgcgcaaaatcggcttcaatgaagcgttccagacgactaacggcatctttatctacgcgttcagcgaagaatttcatgtcgtcagcgcgttcttcgagaaccgctttgaagacatatttcagcatggcttcagccagacccgcaatatcgttcaggttagcaaacgccacttccggctccagcatccagaattccgccaggtgacggctggtgttggagttttcagcacggaaagtcgggccgaaggtataaattttggacaatgcgcaagcgtaggtttcgccgttcaactggccagatacggtcaggaaagactctttaccaaagaagtctttgtcgaaatccactttgccctgatcgttacgcggcaggttttccagatccagcgtagaaacgcggaacatttcgcctgcaccttcggtatcagatgcggtaatcagactcgtactaacccagaagaatccctgctcgttaaagaagcgatgcagcgcctgcgccagcgtatggcgaacgcgcgcgacggcaccaatcaggtttgtgcgcggacgcaggtgagcgacttcacgcagatactcaatgctgtggcgttttgccgccatcgggtaagtgtctggatcttcaacccaaccagcaacttcaaccttgctggcctgaatttcaaattgttgcccctggcccgggctcgccacgactttacccgtcacaatgacgctgcagccggtggtcagacgcaggacgtcttcattgtaattgggcagagaattattgatgacagcctgtacaggatcaaagcaggaaccgtcataaacggcgaggaaggagatgccagctttactatctcggcgggtacgtacccatccgcgcacggtgacttcgctgtcaacggctacacggccctggagtacgtcggctacaggcacaacgctcataatattctctctgttaatagtcggaaaaaataaacacttgtccacccgtaaatggggggatacctatgttacctggcatctgcaatcagacaagcagaattcgcaaatgcagcgaaagatttcggaattaaaggtaaaaaaagggagccgattagctccctgatgatattaactggcttttttaatatgcggaaggtcgaacgctttgcgcagcgcccgaacaaacgctttatcatggcagatagttttgccagggctgtcagaaagtttcgccaccggtttaccgttacactctaccaacttaatgacaatattcaggggttttacctgggggatatcgcaggtcaggcgagtcccaataccaaaacttaattgcacgcgggaagagaagtggcggtatagctcaaccgctttgcgtaaatccagattgtcagagaaaaccagcgttttactctgtggatcaattcccagcttttcataatgtgcaatggctttttcaccccattcaaccgggtcgccagagtcatgacgcaggccctgataccgactagcgaactcgacaccgaaatcacgcaggaaagcatccatagtgatgcagtcggttaatgcaatgccaagttggtcgggatactcttccagccaggcagcaagtgcagctcgctggctgttggctagatccgggctgatttgctgatgtgcctggaaccattcgtgtgcctgtgttcccatcggcgtgagggaaagccgacgcgccagatcgtagttgctggtgcccacaaaccaggattcctgttgcagacgcttaacgatggtttcttgtacttcgcgagaaaaacggcgacgggtgccaaaatccatcagatggaagcggctcatatcaagaccggcggttaacgcgctgaagtcgactaatttgctttccagcgtgtcgagggcttgcgcaacgtcggcctgcggactgcgatagcgatgtaccatttcactgataaccgccagcaaaggaacttcccagaggatgacttcacgccacgggccgcttaaacgaatatccagcttgccattatcgttggacacggtgacttgttccgggttaaagcggaactcgcgtaaccagttaagatagtcggccttaaagaaaggcagggcagaaagccactgatattcatcatcctgcaggcgcaggtgctgcatcgcctgaacctgttcacgaatagcatcggcataaatacccagcagatcgtcacctcggcaacgaaactccgccgcgacatgcacatcgtaatagtgatgaaacacggcttgctgcatatgcaacttataagcatctgtatccagcaagctgtgcagaacaggagaagcgaattgtgtcataggtgcgcagtagcgtcctcgtacaggagcgtttagtacaataaacatcttcaggaactgctggagtataccttgtttcgcaatttattgaaccccgatcacaccatatgccacctttctggtcgatggcattacgcggtgtatgttataaaaatgtagcaataaaggcgtttgtacctgaaaagatgaagattctgcatagcgcgatttacgcaacaggaatagactgaacaccagactctataaaagatgctaaaggttatttatgactcaacagccacaagccaaataccgtcacgattatcgtgcgccggattaccagattactgatattgacttgacctttgacctcgacgcgcaaaagacggtcgttaccgcggtcagccaggctgtccgtcatggtgcaagtgatgctccccttcgtctcaacggcgaagacctcaaactggtttctgttcatattaatgatgagccgtggaccgcctggaaagaagaagagggcgcactggttatcagtaatttgccggagcgttttacgcttaagatcattaatgaaataagcccggcggcgaataccgcgctggaagggctttatcagagtggcgatgcgctttgcacccagtgtgaagccgaaggtttccgccatattacgtattatctcgaccgcccggacgtgctggcgcgttttaccaccaaaattattgccgataaaatcaaatatcccttcctgctttccaatggtaaccgcgttgcgcaaggcgaactggaaaacggacgccattgggtacagtggcaggacccgttcccgaaaccgtgctacctgtttgcgctggtggcaggcgactttgatgtactgcgcgatacctttaccacgcgttctggtcgcgaagtagcactggagctgtacgtcgatcgcggcaaccttgatcgcgcgccgtgggcgatgaccagcctgaaaaactccatgaaatgggatgaagaacgctttggcctggagtatgacctcgacatctatatgatcgtcgcggtggatttcttcaatatgggcgcaatggagaataaggggctgaatatctttaactccaaatatgtgctggcccgcaccgacaccgccaccgacaaagattacctcgatattgaacgcgttatcggccatgaatatttccataactggaccggtaaccgagtgacctgtcgcgactggttccagctcagcctgaaagaaggtttaaccgtcttccgcgatcaggagttcagctctgaccttggttcccgcgcagttaaccgcatcaataatgtacgcaccatgcgcggattgcagtttgcagaagacgccagcccgatggcgcacccgatccgcccggatatggtcattgagatgaacaacttctacaccctgaccgtttacgagaagggcgcggaagtgattcgcatgatccacaccctgcttggcgaagaaaacttccagaaagggatgcagctttatttcgagcgtcatgatggtagtgcagcgacctgtgacgactttgtgcaggcgatggaagatgcgagcaatgtcgatctctcccatttccgccgttggtacagccagtccggtacaccgattgtgaccgtcaaagacgactacaatccggaaaccgagcagtacaccctgaccatcagccagcgcacgccagccacgccggatcaggcagaaaaacagccgctgcatattccgtttgccatcgaactgtatgataacgaaggcaaagtgatcccgttgcagaaaggcggtcatccggtgaattccgtgctgaacgtcactcaggcggaacagacctttgtctttgataatgtctacttccagccggtgcctgcgctgctgtgcgaattctctgcgccagtgaaactggaatataagtggagcgatcagcaactgaccttcctgatgcgtcatgcgcgtaatgatttctcccgctgggatgcggcgcaaagtttgctggcaacctacatcaagctgaacgtcgcgcgtcatcagcaaggtcagccgctgtctctgccggtgcatgtggctgatgctttccgcgcggtactgcttgatgagaagattgatccagcgctggcggcagaaatcctgacgctgccttctgtcaatgaaatggctgaattgttcgatatcatcgacccgattgctattgccgaagtacgcgaagcactcactcgtactctggcgactgaactggcggatgagctactggctatttacaacgcgaattaccagagcgagtaccgtgttgagcatgaagatattgcaaaacgcactctgcgtaatgcctgcctgcgtttcctcgcttttggtgaaacgcatctggctgatgtgctggtgagcaagcagttccacgaagcaaacaatatgactgatgcgctggcggcgctttctgcggcggttgccgcacagctgccttgccgtgacgcgctgatgcaggagtacgacgacaagtggcatcagaacggtctggtgatggataaatggtttatcctgcaagccaccagcccggcggcgaatgtgctggagacggtgcgcggcctgttgcagcatcgcagttttaccatgagcaacccgaaccgtattcgtagcttgattggcgcgtttgcgggcagcaatccggcagcgttccatgccgaagatggcagcggttacctgttcctggtggaaatgcttaccgacctcaacagccgtaacccgcaggtggctagtcgtctgattgaaccgctgattcgcctgaaacgttacgatgccaaacgtcaggagaaaatgcgcgcggcgctggaacagttgaaagggctggaaaatctctctggcgatctgtacgagaagataactaaagcactggcttgataaataaccgaatggcggcaatagcgccgccattcggggaatttacccctgttttctcaggcgagtttcagattcaccacgttgcatcacccgttgcaacacctccgcttccagctccgctaatcgcacgctccctaatcgacgcggacgggggatatccactgtcaaatccagaccaatttttccctcttcaattaacagcacccggtcagccatcgctaccgcttcgctcacatcatgcgtcaccaacagtacggtaaagccgtgctcctgccaaagactcacaatcaaatcctgcatctcgagtcgcgttaaggcgtccagcgccccgagcggttcatcaagcaacaataatcccggtcgatgaatcaacgctcttgccagcgccactcgctgtttctgcccgccagaaagtgcggcaggccattcccctgcgcgattctccagtcctaccgcagccaacgctcgacgtgcggcatcgcgccactggcctttaaggcctaacccaacgttatcaatcacgcttttccacggtagcagacgcgcatcctgaaacatcattcgcgtgtcttcctgaatttcagccagcggtgtggtgcccgctaacacatcgcctgcggttggcgtttccagacctgccagcaggcgcagcagggtacttttgccaccaccgctgcggcccaccaccgccacaaactgacctgccggaatatgtaaatccagttggttcaggacgatattttccgcgtaatgtttgcttactgcattgagcaacaatggcgtgccctggttcagacgagcagtattcataccgtggcctccttcaaatgataagccgggttccagcgcaaccagaggcgctctaacagctgcgcgctgacgtcagccagtttgccgagcagggcgtaaagaataatagcgactaccaccacgtccgtttgcaaaaacccccgcgcattcatcgccagataaccaatgccactattggcagaaatggtttcggcaacaatcagcgtcagccacatcaggcccaacgcaaaacgcacgccgaccataatactgggcagggcaccaggcaggatcacatggataaacagcggtatgccggataatccatagctacgcgccatctccaccaacccgcgatcgatattacggatgccatgccaggtgttgatataaatggggaatagcgtaccgagcgccaccagaaagatttttgcggattcatcaatgccaaaccacaaaatcaccagcgggatcagcgccagatgcggcacgttgcgcaacatctgaatactggtatccagcagccgttctccccagcgagatagcccgctaatcagtcccaaaatcaaccccaggcttccgccaatactaaagccaatcagcgcccgccaggagctgatcgccagatgctgccacagttcgccgctggcggagagcgtccagaacgccgtcaccactccttccggactaggcaaaatacgcgtgctcagccagccaacgctggaggccagttgccacaccgccacgatgcccaccggtaaaaaccagggggcaacgcgcaataaccacttcttcactggcgttgccattatttcttccttagctttgcgcgactttacgggggataaaatcattcgccaccgcttcgccttgcggattcagcggctgcggctggggaatttccgggatggcgacatccagaagcgggaacagcaactcgccaacccgatacgcttcttccagatgcggatagccgctaagcacaaaactgtcgatgccaagcgcggcatattcgttgattcgcgcagcgaccgtaggaccatcgcccaccagcgccgtcccggcaccgccgcgcactaagccaacgcccgcccataaattggggctgatctccagattgtcgcgcttgccgttatgtaacgccgccattcgctgttgccctacggaatccgtccgggcgaatgcggcctgtgctttggcgatagtttcatcatcaagatggctgattaaccgctcggcggcctgccacgcttcgtcgttagtttcacgaacaatcacatgcagacgaataccgaaacgaattttgcgtccatgcgcggcagctttcgcccgcacttgttcgattttctctttaaccagttccggcggttcgccccaggtgaggtagagatcaacctgttctgccgccagctcctgggcgacatcactgcttccgccaaagtaaagtggcggatacggctgttgaatcgccgggaagagcagttttgctccgcgcacatgaatatgtttaccgttgaaatcgacggtttctctctgcaataaacgccgccagacctgggtaaattccgcgctggcttcgtagcgctcgctatgatcaaggaacactccgtcgcctgccagctcttgtggatcgctgcctgtgaccaggttaaacaacgcacgtccattactgagacggtcaagcgtggcggcctggcgggcggcaacggtaggactggttacgctgggacgcagggcgacaagaaacttcagccgctgcgtcaccgggatcatgcttgcggcaaccagccacgcatcttcgcaggagcgccccgttggaattagcacaccggtatagccaagacgatccgccgcttgcgcaatttgttgcagataaccgtgatcaaccgggcgactaccttcttccgttcccagataatgcccgtcaccgtgggtcggtaaaaaccagaacatattcagactcataattgttttccttccagttgagtgggctgccagatgcgctggcgaatatcgacttttttcggcaccagacgattttcataaaacagatctgccgtttgctgctgtaaggcggcaacctcggcgttaaccggtttgatggtggtaggagggcgatgatctaagtaagaggcaatcaccggtgccggtaagcccatcgtttttgccagtaaagcgatgctttgctcgcgctggctgcgggttaacgcatcggcctcactaaaggttgccagtacgccctgaataaaagcgccgtttttttctgcatagggacgagctgccagataaaagcttccagtttgattgagatcggtgccgtctttcagcacccgcacgccgccctgtaataatgcagcagagtagtagggatcccagatagcccaggcgtcaacgttaccttgctggaacgcggcgcgggcatcagcgggcgtcaggtaagtgggttggatatcggtaaacttaagtccggcctgacgcagtgcacgcagtaaaaggttgtgactactggaacctttctgaaaggcaactttgtgacctttaagatcggctacggttttgatcgggctgttttctgccaccagaatcacttcggctttgggcttcggtggctcgacgcccacgtacaccaaatcagccccggcagcctgggcaaagattggcggaatatccccggtactgccgagatcaatactgccaacgtttaacgcttccaacatttgcggacccgcggggaactccacccaggagattttactttccggatagcgtttttccagtaactggtggctttttgccagcaccataccaatactgcctttctgatagcctatacgtaacgcttcagggctggattctgcagcaaccgcaaaagtagagacgctaagcaatcccgccagcgccagtttaatgatgttacgcatgggcattacctcgcagagacagaaggtcaggaacctgaacatcgcggcggtgcaatgcctgccagaaagtttctagcgcggtatcaagacgggtttgcagatttggcgtgaactggggtctgtgatggtaatcaattacttgactgtcatcggcaaacacgccgtgcaggatctcctgagctttcagtgcgcttaaaactggtttaagggcataatcgaccgccagcagatgggccacggtaccgcccgtcgccagcggtagcaccactttgccttgcaaagcgcgttctggcagcaggtcgagcagggttttcaacgcaccggaataggcggctttatacacaggcgtggcgacaatcagcccatcggcctgttgcagctgttcggtgaaggtcttgagtgccggactatcgaaacgagcataaagtagatcttccggggcgaagttttgcagattccagtgataaacctctacatccaggccatttagtttttcccgcgcatattccagcaaggagctggagcgagaaggaaagcgaggactacccgccagggtgatgacacgcatactctctccttataaccaattgttctttttttgttaacattgataacaattcggtcagtctgtcggagagacaagaaaattccaaatataaattttgtgtatctttttctgaaaataaactaaagaaagggctttatatatcacgcatatttatttattggatagtcattagatgttgaatcaatgaattactcgttcagttaatatttaaatattcatgaaatctataaattaaagatttgtcacttattggatttagtatgcttgatttaaatggcggacaattattgttattattaagtctaatgtcatttaaaggcattatcatatttacgaagagatcaggatgataacgatgaaaaaaagtgtattgacggcgtttataactgtggtatgtgcaacgtccagcgttatggctgctgatgataatgctatcacggatggcagtgtaacatttaatggtaaagttattgctccagcttgtaccctggtagctgcgacgaaagattccgtggtgactttgccagatgttagtgccacgaagttgcaaaccaatggtcaggtttctggcgtgcaaattgatgtgccaattgaattaaaagattgtgatactaccgtaacaaaaaatgcaacgttcacctttaatggcactgcggatactactcagattacagcgtttgctaaccaggccagttctgatgctgctacaaacgtggccctgcaaatgtatatgaatgatggtacaacggccatcacgccagacacagaaaccgggaacattttgttgcaggatggagatcagacgttgacttttaaagttgattatatcgctacggggaaagcgactagtggtaatgtgaatgcggtaacaaatttccatattaactattattaatagaactcattaattgttttattaattagtacccctccagtgttctggaggggatattcatattttttaagagtgactatttatgaaaacttgcataacaaagggaattgtgaccgtaagtttaacggcaatattactcagctgcagttccgcatgggcggcaggtaaaggcgggattggacttgcagcaacacgtcttgtttatagtgaaggtgaagagcaaattagtctgggtgtacgtaacaccagtccggatgttccttatcttattcagagttgggtgatgaccccagataataaaaaaagtgcagactttattattacaccaccgctatttgtgctgaatccggcaaatgagaatctgttacgcattatgtacattggagcgccgttggcgaaagacagagaaacccttttcttcactagcgtacgggcagtccctagtacaacgaagcggaaagagggaaataccctgaagattgccacacaaagcgtcatcaaacttttctggcgaccaaaaggtttagcgtatcccttaggcgaggctccggcgaaactgcgttgcactagcagtgctgacatggttacggtcagtaacccaacaccttatttcattaccctgacagacctgaaaataggtggaaaagtagttaaaaatcaaatgatttccccctttgataaataccaattttctctgccaaagggggccaaaaatagcagcgtaacgtatcgaaccatcaatgactacggggcggaaacgccgcaactcaactgtaaaagctaagccgtcttcagttaagagagcgagatgtatagaactcatcgacaacacagcctgttaagctctggtggagtgccaagctttattggtgggctggtggtgtttgtgagcgcagcgttcaatgcacaagctgaaacctggttcgatcctgcttttttcaaagatgatcccagtatggtggccgatttgtctcgtttcgaaaaaggacaaaaaataacgccaggggtttatcgtgtcgatattgttctgaatcagacaattgtagatacgcgcaacgtcaattttgttgagataacgccagagaaggggattgccgcctgtttgacgactgaaagcctggatgcaatgggtgttaatactgatgcgtttccggcttttaaacaactggacaaacaagcgtgtgtgccattggcggagattattccggatgccagcgtaacgtttaatgtgaataaactccgtctggaaattagtgtaccgcaaatcgccatcaaaagtaatgcccgtggttatgtcccccctgaacgttgggatgaagggatcaacgcgctattactgggatatagctttagcggggctaacagtattcatagcagcgcagacagtgattctggcgacagctattttctgaatttaaacagtggcgttaatttaggcccatggagattgcgcaacaatagtacatggagtcgtagtagtggccaaaccgcagaatggaagaatctcagcagctatttgcaacgggcggttattcctctgaaaggcgaactgaccgtaggtgatgattatactgcaggcgattttttcgatagtgtcagctttcgtggtgtgcagctggcgagtgatgacaacatgctgccagacagcctgaaagggtttgcgcctgtggtgcgtggtatcgccaaaagcaatgcccagataacgattaagcaaaatggttacaccatttaccaaacttatgtaagccctggtgcttttgaaattagtgatctctattccacgagcagcagcggtgatttgttagttgaaatcaaagaagcggacggcagcgtcaatagctacagcgtaccgttctccagtgtgccattactccagcgtcaggggcgaatcaaatacgcggtgacactggcgaaatacagaaccaatagtaatgaacagcaggagagcaaatttgcccaggccacgttgcagtggggcggaccgtggggaacgacctggtatggtggtggacaatatgctgaatattaccgtgccgccatgtttggtctgggatttaacctcggcgatttcggagcaattagcttcgatgcgacccaggcgaagagtacgctagcagatcaaagcgaacataaaggtcagagttatcgttttctgtatgccaaaacgctcaaccacttgggcactaactttcaattgatgggctatcgctatagcacgagcggtttctacaccctttccgacaccatgtataaacatatggatggctacgaatttaatgacggtgatgatgaagatacgccgatgtggagccgttattacaatttgttttacaccaaacgtggcaaactgcaggtcaatatctcccagcaattaggcgagtacggtagcttttatttaagtggtagccagcaaacttactggcatacggatcaacaggatcggctattacagtttggctacaacacgcaaattaaagatcttagcctggggatttcctggaactacagtaagtcccgtggtcaacctgatgctgatcaggtgtttgctctaaatttttccctgccgctcaatctgttgctccccagaagtaatgatagctataccaggaaaaaaaattacgcctggatgacctctaacaccagtatcgataacgaagggcacactacacaaaacctgggtttaacggagacattactcgatgacggtaacctgagctacagcgtgcaacagggatataacagcgaggggaaaacggctaatggtagcgccagcatggattacaaaggggcgtttgcggatgcccgagtgggctacaactacagcgataacggcagtcaacaacaactgaactacgctcttagtggcagtttagttgcccatagtcagggcattaccctggggcaaagcctgggggaaactaacgttctgattgcagcaccaggcgcagagaatactcgtgtggcgaacagcaccgggctgaaaactgactggcgcggatataccgttgttccttatgccacttcttatcgggaaaatcgaatcgcacttgatgcggcgagcttaaaacgtaacgtggatcttgaaaatgcagtagtcaacgtggttcccaccaaaggggcgttggttctggcggagttcaatgcccatgcgggtgcaagggtattaatgaaaacaagtaagcagggtataccgctgcgttttggcgcgatagcgacgctggacggcgtacaggctaatagcggcataattgatgatgatggcagcctctatatggcgggtttaccggcgaagggaacaataagcgtgcgctggggcgaagctcccgatcaaatttgtcatatcaattacgagcttaccgaacaacaaattaactctgcgattacgcgaatggatgccatatgcagataatctttggagaaaaatgcgtgagtttactacgactattttttgccgccgtcttaatgttatggtgcgctcaaaccgctgcttatagcgggcagtgtcatactactcaggggaatccgtatattggcgtcaattttggcgttaaaaccctggaggaagaagcaaatacggcaggggtagttaaagacaaattttatcagtggaacgaaagcaatgattattatgtttcctgtgattgcgataaagacaatgtcagaagtggccgatgggcattcgccgcggatagtccgttagtctatttaggcgacaactggtacaaaattaatgactatcttgccgccaaagttttattgcaggttaaaggcagttctcctactgcggttcctttcgaaaacgtgggcacagggggggatacccgatggcatatttgcgaccctggcggtcaacgtttaggtgggcagggggcaagcggtaatagcggtagcttttccctgaaaatattgcagccgttcgttggcagcgtcgtcattcctcctatggcgctggcgcgattatatgaatgctacaacatacccgcaggtgattcctgcacgactacaggtacaccggttttagtgtattacctgtctggtacgatcaatagtcttggcagttgttccgtcaatgccggagagacaattgaagttgatttaggtgatgtcttcgctgccaatttccgtgttgtagggcataaacctcttggggccagaacggcagaacttgcaattccagtcaggtgtaacacgggaaacgcgggattagttaatgtcaacctgagtctgacggcaaccacagaccccagctatccccaggcgattaagacgagtcgtcctggcgtgggcgtggtggtgaccgatagccagaacaacattatttcccctgctggtggaacattaccgctctctattcctgatgatgcagacagtatcgcgcgaatgaatgtctatccagtcagcacgacaggtgtaccaccagaaaccgggcgatttgaagccacggcaacggtgagaataaattttgattaacgcgtgaacgtatgaagaaaaaaacgatatttcagtgcgttatcttgttctttagcattcttaacatccatgtcgggatggctgggcctgaacaagttagtatgcatatttatgggaatgtggtcgatcagggctgtgatgtcgccaccaaaagtgcattacaaaatattcatattggtgattttaatatcagtgattttcaggccgcgaataccgtaagcactgctgctgatttgaatatcgatatcaccggttgtgccgctggtattactggcgcggacgtcctttttagcggcgaggctgacacccttgcgccgacactgctcaaactaactgacacaggcggaagcggtggtatggcaacggggattgccgtgcaaattcttgatgcgcaaagtcagcaagaaatcccgctcaatcaggtccagcctcttacgcccttaaaagccggggataacacactcaaatatcaacttcgttataagtccacaaaggcgggagcaacgggcggtaatgcgacggcggttctctattttgatctggtttaccagtgaaggagtgatgttgaaacggataatctggattctgttcttattgggattaacgtggggctgtgagctatttgcccatgatggcacggtcaacattagcggaagctttcgccgtaatacatgcgtgctggcacaggatagcaagcaaatcaatgtgcagttaggcgatgtcagcctgacacgtttttctcatgggaattatggcccggagaaatctttcatcattaatttgcaggattgcggaacagatgtcagcacggttgacgtcacctttagtggaacccccgacggagtgcagagcgaaatgttgtccattgaaagtggtacggatgcagccagcgggctggcaattgcgattctggatgatgcgaagatattgattccgcttaaccaggcgagtaaagactacagcctacatagcggtaaggtgccattaactttttatgcgcaattgcgacctgtcaatagcgatgtgcagagcggtaaagtgaatgccagcgcgacatttgtacttcattatgactaatacgtggaacagattggcgctcttgattttcgccgttttaagcctgctggtggcgggtgaattgcaggcaggagtggtggtcggcggaacgcgatttatctttccggcagacagagaaagcatatctattttactgactaataccagtcaggaatcctggcttattaacagtaaaatcaaccgcccaacgcgttgggccgggggggaagcgagcacagtgccagcaccattactggccgctccgccacttattctcctgaagcccggtacgacaggcacgttgcgcttgctgagaacggaaagcgacatcttgcctgtggatcgcgaaacgctatttgagttaagcattgccagcgtgccatccggcaaagttgaaaatcagagcgtaaaagtggcgatgcgcagcgtatttaaactgttctggcgacccgaaggtttgccgggcgacccgctggaagcttatcaacaattacgctggacacggaatagccagggtgtacaactcactaacccaacgccttattacattaacctgattcaggtgagtgtaaatggtaaagcgttaagtaatgtgggagttgtgccgcctaaaagccagcgtcagacaagctggtgtcaggcaatcgcaccgtgtcatgtcgcctggcgggcgataaatgattacggcgggttgagtgcaaagaaggagcaaaatctgccctgaaacaggttcggaaaacgtttgcgttttttttgccgcaggtcaattcccttttggtccgaactcgcacataatacgcccccggtttgcacaccgggaatccaggagagttcatgtactaccccttcgttcgtaaagcccttttccagctcgatccagagcgcgctcatgagtttacttttcagcaattacgccgtattacaggaacgccgtttgaagcactggtgcggcagaaagtgcctgcgaaacctgttaactgcatgggcctgacgtttaaaaatccgcttggtctggcagccggtcttgataaagacggggagtgcattgacgcgttaggcgcgatgggatttggaagcatcgagatcggtaccgtcacgccacgtccacagccaggtaatgacaagccgcgtctctttcgtctggtagatgccgaaggtttgatcaaccgtatgggctttaataatcttggcgttgataacctcgtagagaacgtaaaaaaggcccattatgacggcgtcctgggtattaacatcggcaaaaataaagatacgccagtggagcagggcaaagatgactatctgatttgtatggaaaaaatctatgcctatgcgggatatatcgccatcaatattagtagcccgaataccccaggattacgcacgctgcaatatggtgaagcgctggatgatctcttaaccgcgattaaaaataagcaaaatgatttgcaagcgatgcaccataaatatgtgccgatcgcagtgaagatcgcgccggatctttctgaagaagaattgatccaggttgccgatagtttagttcgccataatattgatggcgttattgcaaccaataccacactcgatcgttctcttgttcagggaatgaaaaattgcgatcaaaccggtggcttaagtggtcgtccgcttcagttaaaaagcaccgaaattattcgccgcttgagtctggaattaaacggtcgcttaccgatcatcggtgttggcggcatcgacagcgttatcgctgcgcgtgaaaagattgctgcgggtgccagtctggtgcaaatttattctggttttatttttaaaggtccgccgctgattaaagaaatcgttacccatatctaattatttcttcgaattcctctttataagataatcagggctttattttcagccctggttgttttatattcatcgctgttgcttatttagacattttgtacttttattgttgaggttattaagcgaagcgacaatggattgtgttgctgcggttttatagggtaggggagaggcagatgcgaattaaaccagacgataactggcgttggtattacgatgaagagcacgatcgaatgatgctcgatttagccaatggtatgctatttcgcagtcgttttgcgcgcaagatgttgactccagatgccttttctcccgcaggcttttgcgttgacgacgccgcgctctatttctcttttgaagaaaagtgccgcgattttaatttatctaaagaacaaaaagccgaactggtgctgaatgcactggtagcaattcgctatctcaaaccgcaaatgccgaaaagctggcattttgtttcccatggtgaaatgtgggtgcccatgccgggcgatgcggcctgcgtttggttgagcgatactcacgagcaggtcaatttgctggtcgttgaatctggcgaaaatgccgcactatgcctgctggcacaaccctgcgttgttattgcgggtcgcgcgatgcagttgggcgacgccattaaaatcatgaacgacaggctgaaaccgcaggttaatgttgacagcttcagcctcgaacaggcagtttaacgcgccaacttaagtgcagtcttcggtacacagctacagcaaagaatggtgccatcatcgcccattgcactttttttcagcggcgtgacttcgccttctaaaagctgaacacggcaacttccacaaatgcccgcgcggcaagaataagggatacgaattccctgattttctaattgctccagcaacacctgttggttatttccacgaaatgcctgtccctgccagtcaatatctacatttgcgtccggttgttgcgtgatgttggcggtatcatcagcggcagctgcgccgtaaatttttgccggagccgttgccagaatttccacctcatcgccaacgcgaatcacgccgctattacgggcaattaaattctgaccaaaatcgacatcgccgttatcctgggcagtgcggaaagattgcaatgtttttaatggttcgcctgccggatgtttttgccctttttctgggctgacggtggtgaaaatacagcggctacaaggtttaaccacatcaaacaccacatcaccaatgcgaatcactttccagcgatcttcttcccaggcactcgcgccggaaaccaccagattggggcggaattgctccatttttacactggccggacaacgttgttggagatcacgtaagctggcttcgttagcaagaaggtaaggatagccatcagcaaaactcagaggtacagtgttgtggcgtttcacgcgccgggtcatttgtggccccacccagcgtaattgcacttcgcgggagaaaaatccacttagccatttgttgatcgcgtctggcgcaattcgcgcggtaaaatgtgtgccccaaacttcggttggtgcgtcttgtgtggcgaaatcagcaaaacgaacatatgcgctactgccatctggtgcggtgagatgcaagccatcatgcacaggactaggagtaaaccgtaccatctggggaaactggcgagcggtaataaacgtaccgtcaggttccgtgatcataaagatgcgatcgaaggccagaccactgacatctgccagagcatgtgtaagaccaatgccgcgcatgcttttaacaggatgaataaaaagccggattaatgtcgccacggtgcggtcctcaaatgaaaataagccctcaactttatgacatgacgcgcttattagctataatgcgcaacaattttcttagcgcctgtcccattaggctattttatttgtcagtttggccctgggttatgctcgaaatcctcacgtacttgtgtacgctccggtttctccgcgctgtccatgtccagactgactgcaacaattacgcctactgcggtaggctcttagagtaaaagtgacgatatgaattctctgtttgccagtacggcccgtgggctggaagagctgttaaaaactgaactggaaaacctgggggccgttgaatgccaggtggttcagggtggggtccatttcaagggcgacacacggcttgtttaccagagcctgatgtggagccgcctggccagccgtattatgttgccgctgggcgagtgtaaggtttacagcgatttagacctctatctcggtgttcaggcgatcaactggacagagatgtttaatcctggcgcgaccttcgctgtccacttcagtggtttgaatgacaccatccgcaacagtcagtacggcgcgatgaaagtgaaagacgcgatcgtcgatgctttcacgcggaaaaatctgccgcgtccaaatgttgatcgcgatgcgccggatatccgcgttaacgtctggctgcataaagaaaccgccagtatcgctcttgatctgagtggtgatggtttacatctgcgtggctatcgcgatcgtgctggtattgcgccgatcaaagaaaccctggcagccgctattgtgatgcgatccggctggcagccaggaacaccgctgctcgatccgatgtgtggttccggtacgttgctgattgaagcagcgatgctggcgaccgatcgcgcaccaggcttgcaccgtgggcgttggggctttagcggctgggcgcagcatgatgaagctatctggcaggaagtgaaagcggaagcgcaaactcgcgcccgtaaaggcctggctgagtatagctctcatttttacggtagcgacagcgacgcacgggtgattcaacgtgcacgcactaacgcccgtcttgcggggattggtgaactgatcacctttgaggtgaaagatgtcgcgcaactgaccaatccgctgccgaaagggccgtacggcacagtgttgagcaacccgccatacggggaacgtctggacagcgaaccggcgctgattgcgctgcatagcctgctgggtcggatcatgaaaaaccagtttggtggctggaatctctctttgtttagtgccagcccggatctgctaagctgcttgcagctgcgtgcagacaaacagtacaaggcgaaaaacggcccgctggactgcgtacagaaaaattaccacgttgccgaaagcactccagacagcaaaccggcgatggtagcggaagactacaccaaccgcctgcgtaagaacctcaaaaaattcgagaagtgggctcgccaggaagggattgaatgttaccgcctgtatgacgccgatctgccagaatataacgttgccgttgaccgttatgccgactgggtggtggtgcaggagtatgcgccgccaaaaactattgatgctcacaaagcgcgtcagcgtctgttcgatattatcgctgcaaccattagcgtactggggattgcgccaaacaaactggtgctgaaaacccgtgaacgccagaagggcaaaaaccaataccagaaactgggcgagaagggcgagtttcttgaagttaccgaatataacgctcacttgtgggtgaacctgacggattatctcgatactggtctgttcctcgatcaccgcatcgcccgtcgtatgctcggtcagatgagcaaaggcaaagatttcctcaacctgttctcttataccggcagcgccaccgtgcatgcgggattaggcggtgcacgcagcaccaccaccgtggatatgagccgtacttatctggaatgggcagaacgcaacctgcgtctgaatggcctgaccgggcgtgcgcatcgcctgattcaggccgattgcctggcgtggctgcgtgaggcaaatgaacagttcgatctgatctttatcgatccgccaaccttctctaacagtaaacgaatggaagatgcgtttgatgttcagcgcgatcatctggcgctgatgaaagatttgaaacgtctgctgcgtgcaggtgggacgatcatgttcagcaacaacaaacgtggcttccgtatggatctcgacggcctggcaaaactgggactgaaagcacaagaaattacgcaaaaaacgctctcccaggatttcgcccgtaaccgccagatccacaactgctggctgattaccgcagcctgaaaggaatagtaatgagtttaatcagtatgcatggcgcatggctgagcttcagcgacgcgccgcttctcgataacgcagaactgcatatcgaagataacgaacgtgtttgtctggtgggccgcaacggcgcaggcaaaagcacgttaatgaaaatcctcaaccgtgaacaagggctggatgacggtcgcattatttacgagcaagatttgattgtagcgcgtctgcaacaggatccgccgcgtaacgttgagggtagcgtttatgatttcgttgccgaaggcattgaagaacaagcggaatatctgaaacgctatcacgatattagccgcctggtgatgaacgacccgagcgagaaaaatctcaacgaactggcgaaggttcaggaacagctggatcaccacaacctgtggcagctggaaaaccgcatcaacgaagtgctggcgcaactggggttagatcctaacgttgcgctgagcagcctttccggcggctggttgcgtaaagcggcattaggacgcgcgctggtgagtaatccgcgcgtgctgttgcttgatgaaccgacaaaccacctggatattgaaaccatcgactggctggaagggtttttgaaaactttcaacgggacgattattttcatctcccacgaccgtagctttatccgcaatatggcgacgcgcattgttgatctcgatcgcggcaagctggtgacctatccagggaattacgaccagtacctgctggaaaaagaagaagccctgcgcgtggaagaattacaaaatgccgagttcgatcgcaaactggcgcaggaagaggtgtggatccgccaggggatcaaagcacgccgtacccgtaatgaaggccgcgtacgcgccctgaaagcgatgcgtcgcgaacgtggtgaacgtcgcgaagtgatgggtaccgcaaagatgcaggtggaagaggccagccgctccggtaaaatcgttttcgaaatggaagacgtttgctaccaggttaacggtaagcaactggtgaaagatttttctgcccaggttctacgtggcgacaaaattgccctgattggtccgaatgggtgcggcaaaaccacgctgctaaaactgatgctcggtcagcttcaagtggacagcgggcgtattcacgttggcaccaaactggaagtggcttatttcgatcagcaccgcgcggaactggatcccgataaaacggtgatggataaccttgccgaaggtaagcaagaggtgatggttaacggcaagccacgccacgtattgggctatttgcaggactttctgttccatccgaaacgggcgatgacgccggtacgtgcgctttctggcggtgagcggaaccgcttgctgctggcgcgtttgttcctcaaaccaagcaacttattgattcttgacgaaccgaccaacgatcttgatgtcgaaacgctggaactgctggaagaactgatcgacagctatcagggcacggtattgctggttagccacgatcgtcagtttgtcgataacaccgttacagaatgttggatcttcgaaggcggcggtaaaattggtcgttatgtcggcggttatcatgatgcccgtggtcagcaagagcagtatgtggcgctcaaacagcctgcggtgaaaaaaaccgaagaagccgccgcggcaaaagcagaaactgtaaaacgcagcagtagcaaactaagctataaattgcagcgcgaactggagcagctaccgcaattgctcgaagatctggaggcgaagctggaagccctacagacgcaagtggcggatgcttccttcttcagtcagccgcatgagcagacgcaaaaagtgcttgctgatatggctgctgcagagcaggagctggagcaagcctttgaacgctgggagtatcttgaagcgttaaaaaatggtggctgatcgcaaaatagtcgatttaaacagagacagctgacaacggtaaaattgcctgatgaactgggtttatcaggcatgaaaaccaacactttgttagtcatctgtaaaatagcgcatcattaaggagtaccaatgtgcgaacatcatcatgccgcgaagcacatcctgtgcagccagtgtgacatgctggtggcgttaccgcgccttgagcatggtcagaaagcggcatgtccccggtgtggcacaacgttaaccgtggcgtgggatgcccctcggcagcgtcccaccgcctatgcgttggctgcactgttcatgctgttgctgtccaacttgtttccttttgtgaatatgaacgttgcaggagttaccagtgaaattacattactggaaattcccggcgtgcttttttctgaggactacgccagcctcggcacctttttcctgttgtttgtgcaactggttcccgcgttttgtctgataaccattctgttactggtgaatcgcgcggaattaccggtccgtttaaaagagcaactggcacgggtgctttttcaactcaaaacctggggaatggcggagattttcctcgcgggtgtgctggtcagtttcgttaaactgatggcttacggcagcattggggtaggcagcagctttctcccctggtgtttattttgtgtcctgcaactgcgcgcttttcagtgcgttgatcgtcgctggttatgggacgacatcgccccgatgccagaactgcgccagccgctaaaaccaggcgtcacggggatacgtcaggggctgcgtagctgctcctgttgtacggcaatccttcctgctgatgaacccgtgtgcccgcgttgtagtaccaaagggtacgttcggcgtagaaacagcctgcagtggacactcgcgctgcttgtaacgtccatcatgctgtatcttccggctaatattttgcccatcatggtgacggatttattaggcagcaagatgccgagcacgattctcgctggggtcattctgttatggagcgaaggctcttatcccgtcgctgcggtgatctttctggccagtattatggtgccaacgttaaagatgatcgccatcgcgtggctgtgttgggatgccaaagggcatggcaagcgcgacagtgaaagaatgcatttgatttatgaagttgttgagtttgtaggccgctggagcatgattgacgttttcgttatcgcggtgctcagcgcgctggtgcgtatgggaggtttaatgagtatttatccggcaatgggtgcattaatgtttgctttagtcgtcataatgacaatgttttctgctatgacgtttgacccgcgtttgagctgggatcgtcaacctgaaagtgagcatgaggagtcctgacagtatggaatctaataatggggaagccaaaatccagaaagtgaagaactggtctcccgtgtggatatttcctatcgtcacggcgctcattggggcctgggttcttttttatcattacagccatcagggaccggaagtgaccctgatcaccgcgaatgcggaaggaattgaaggtggcaaaaccaccattaaaagccgtagcgttgacgtcggcgtggttgaaagcgccacactggctgatgatttgacgcacgttgaaatcaaagcgcggctgaattccggtatggaaaaattgctgcataaagacaccgtcttttgggtggtgaaaccgcagattggtcgcgaagggattagcggcctgggaacgctgctgtctggagtttatatcgaactgcagccaggcgcgaaaggcagcaaaatggataaatacgatttgctggacagcccaccgttggccccgcctgatgcgaaaggtatccgtgtgattctcgatagcaaaaaagccgggcagctcagcccaggagatccggtgctgttccgtggctatcgggtaggtagcgttgaaaccagcaccttcgatacacaaaaacgcaatatcagctatcaactgttcatcaatgcaccttatgaccgactggtgaccaacaatgttcgcttctggaaagatagtggcattgcggttgatctgacgagtgcagggatgcgtgtggagatgggcagtttgacaacgctgctgagtggcggtgtcagctttgatgtgccggaaggtctggatttagggcagccagtggcaccgaaaacagctttcgttttgtatgatgatcagaagagcattcaggatagcttgtacaccgatcacattgattatctgatgttctttaaagatagcgtacgcggtctgcaaccgggagctccggtagagttccggggtattcgcctgggtaccgtaagcaaagtgccattctttgcgccgaatatgcgtcagacatttaacgatgattaccgtattccggtactgattcgtatcgagccagagcggctgaaaatgcagcttggcgaaaatgcggatgttgttgagcaccttggcgaattgttgaaacgtggtttacgcggaagcctgaaaaccggaaacctggtcactggtgcactgtatgttgatctcgatttctatccaaatacgcctgcaataaccggtattcgtgaatttaatggttatcagattatcccgaccgttagcggcggcctggcgcaaatccagcaacgactgatggaagcgttggataagatcaacaaactgccattgaatccgatgattgaacaggcaaccagtacgctttctgaaagtcagcgcacaatgaaaaacctgcaaacgacgctggatagcatgaacaagatcctcgctagccagagcatgcagcagttgccgacggatatgcagagtacgttgcgtgaattgaatcgcagcatgcagggcttccagcctggctccgcagcctacaacaagatggtggcggatatgcagcgccttgatcaggtgttgcgagaactgcaaccggtgctgaaaacgttcaatgagaagagtaacgcgctggtatttgaagcgaaggacaaaaaagatccagagccgaagagggcgaaacaatgaaaaagtggctagtgacgattgcagcactgtggctggccggatgcagctccggcgaaattaataaaaactattaccagttacctgtggtgcagagcggtacacaaagtaccgccagccagggcaatcgtctgttatgggtagagcaggtcactgttcctgactatctggcggggaatggtgtggtttatcaaaccagtgatgtgaagtatgtgattgccaacaacaacttgtgggccagcccgttggatcaacagttgcgcaacaccctggttgccaacctgagtacgcaactgcccggctgggtggttgcctcccagcctctgggaagcgcccaggacacgctcaatgttaccgtaacggagtttaacggtcgctatgatggcaaggtcattgtcagtggtgagtggctgttgaaccaccagggacaactgatcaaacgtccgttccgtctggaaggagtgcaaactcaggatggttacgatgagatggttaaagtgctggccggtgtctggagtcaggaagccgcttctattgcacaagagataaagcgtctaccttaattataaagatttgtaaatataaccgtctccggtatgttgcctgaggcggtttttttgtctctaacgtgcggaaaaatttgttcctcttcacattttttgtacaaccgacatgcccgtgtagctcacaaatatgacagtggcgtgaattttgcgcattgacggcagttatgattcgcggtattgcttaactgtgattgcacatttagtaatcactgttttcttttccaccagaaaccagtatgagggaaacgaggcatgaagagacaaaaacgagatcgcctggaacgggcacatcaacgtggttatcaggccggcatcgccggacgcagtaaagaaatgtgtccctatcagacgctgaatcaaaggagtcaatggctgggaggctggcgagaagccatggcggacagggtagtaatggcctgattctgtctctttaaaaagaaacctccgcattgcggaggtttcgccttttgatactctgtctgattataatcagaaggcagacgtatcctggaacagaccgactttcaggtcgctggcggtatagatcagacgaccatcaaccagcacttcgccatccgccaggcccataatcagacgacggttaacaatgcgtttaaagtgaatacggtaggtcacttttttcgctgtcggcagtacctgaccagtgaatttcacttcgccaacgcccagcgcgcggcctttaccttcgccgcccagccagccgaggtagaaccctaccagctgccacattgcgtccaggcccaggcatcccggcataaccggatcgccaataaagtggcatccgaagaaccacagatccggattgatatccagttctgcttcaacataccctttgtcgaagttaccacccgtttcggtcattttgaccacacggtccatcatcagcatgttcggtgctggcaattgcgggcctttagcgccaaacagttcaccgcgaccagaggcaagaaggtcttcttttgtataggattcgcgtttatctaccatgttctctgtaagccttattttattgaagcacgcaggatagctaacacgtgtacgctgaacaagtccgatcagttcggaataaaccagttcagccaacgtaatggccatggaaaacggtgacgtccttcctgttggcttgcttgcgcgatacgttcctggatggtttgcatcagcgtcgtttggccttcgccatcccacaccagatttaataataacggcagtgcgtcagtcacatcgtctactgcccagatggtgaatttgccttcttctaccgctttcaccagttcactgtgaagacttaaatggcgaacgttagctgtggggataatgacaccttgtttcccggttaactcacgttgctggcaaatagcaaagaagccttcgattttctcatttaaaccaccgaccggctgggcgcgaccgaactgatcgacactacctgtgatagcgatactctgattcaccggcacatcggcgagggcgcttatcagggcgcagagttcagccatgctggcactatctccatcaacttcactgtaactctgctcaaatgtcaggcttgcactgaaggggatctgttgctcaagctgtagttcgctcatcaggaacgcttgcatgatcatcatccctttcgcatggatattgccgccaagctccgctttgcgttcgatgtcggtgaattcaccatcgccaatatgcacaacgcagctaatgcgagaaggttcgccaaaagcgcgtggatgacccggaaattcaatgacgctaagggcgttaatttgcccgatgcgttcgccttcggtttcaatcaggatttgctcctgaaggatctcatcctgcatacgttcagcgaggaaaccttcgcgccattcacgctgctgcagcattaagtttagctgctcgccggagaaggtgtcgccatcacacagggaggcgacctctttacactggcggaggatccactgcgggctaagcggaagtgtttcttgttcaccggtgtagcgtgctgcttcgcggataagtatcggccaggcatccgctcccggtgcaggtaagtgattatgtctggcggtaaatgtcacccagcgacaccactgggttacactctccgcatcgacaatctgcagagtatcttcaaattcgctataaatagcctgctcactaagctctggctccatctcctggaaatcagccaaactttcgcgttcgcctaccagaatgactttcagcttcaatggcatgctaggcacagagacggggagagggcggctctcatcaaacgcaacccagtcaaaacgctcgcggttaacgatatttttcagccgcatccacagcagaggttgcgccagcagtgtacgcaaagagataatgagaataccgccatttgcctgatgcaccagaccaggctgcagggtaatgtcgccattaaactggcgcaggcagccaaagagttgctccgcttctacccagtcggcagcgacaacttgcgttaaagtcgcaaaattatcatctgcactcactgcgtgacgtaagcggatggagtggccggaaacctcatagtgaccgcccaccagttggcctgcatcgctttgtagcgtacgcgcggcattggcaataagattcagatactcagactcttccggggccttcgccagcataaaagaggaggatgctcgcgtatgcagcaactgctccagcgcaaattgcagccgcggttgagtatcactgaataaaggatcgttttcgtcaatcaaatgtggctgagcaaatatttcctgatagctatcggtatcaggaaccaggtcacgccatgcaagtttcgtaatggtcaaagttgatgttttttagtctgttgtcaaagccgcgattataccgtaaccggcactacagcacacgtagaaagcaccgacaatactcctggcatgggcgttaaagctcacaggatggagattcttttcttcactggcctaaaaagctgatattctgtaaagagttacacggtaacattgagatcgctatgaaatatcaacaacttgaaaatcttgaaagcggttggaaatggaagtatctggttaagaagcatcgcgaaggggagttaatcacccgttacatagaagccagtgccgcccaggaagccgtcgatgtgttgctcagcctggaaaatgaacccgtgctggtaaatggctggattgacaagcatatgaatccggaactggtcaatcgcatgaagcaaaccattcgggcaagacgaaagcgccattttaatgcggaacaccagcatacgcgcaaaaaaaagcatcgatctggaatttattgtctggcaacgtctggctggtcttgcgcagcgtcgcggtaaaacgctttctgaaacgattgttcagctgattgaagatgcggaaaacaaagagaaatacgcgaataaaatgtcttctctgaagcaggatctgcaggcattgctgggtaaggaataactgacgaaagtcagttcaatttactaaaggcaaaaaaaaccccgcagcagcggggtttttctaccagacgagaacttaagcctgcggctgagttacaacgtctttgatacctttaacttcgatctctacgcgacgatccggagccaggcagtcgatcagtgcagcacgctgtttcacgttgtcacaggtgttgccagtaaccgggttggattcgcccataccacgtgcggagatcttgtctgccgggatacctttggagatcaggtaatcaacaacagactgagcacggcgctcggacagaccctggttgtaagcgtcagaaccgatgcggtcggtgtaacccagaacaactacggaaccgtctttcggatccaggttgctcagctggctgtacagctgatccagagcagcctgaccttccggtttcagggttgctttgttgaagttgaacagaacgtcagacttcagagtgaagtgcttggtctgtacttccggtgccggagctggagccggagcaactactggagctgcttcgccctgaccgaaacggtaggaaacacccaggctcagcatgccgttgtccggacgagtgccgatggtgtgtgcgtcaccgatgttgttggtccactggtattccagacgggtagcgatttcaggagtgatcgcgtactcaacaccgccagcgaagaccggagaaacgccggtgtcgtggtttttaccataaacgttggatttagtgtctgcacgccataccatgccacccagacgagtgtagatgtccaggtcgtcagtgattgggtaacccagtttagcggtcagttgaacgccctgagctttgtatgcaccgttttcaacgctgcctttgtacggcatacgacctaaccagtcgtaacccatttcaaagccaacatacgggttaacctggtaaccaccaaaagcaccagcgcccagttggttttcatgggtcgggccattgttgttgatgaaaccagtgtcatggtactgggaccagcccagtttagcaccagtgtaccaggtgttatctttcggagcggcctgcgctacggtagcgaaaccagccagtgccactgcaatcgcgatagctgtctttttcattttttgcgcctcgttatcatccaaaatacgccatgaatatctccaacgagataacacggttaaatccttcaccgggggatctgctcaatattaactctaccgatatcttcggcttatgccgagcacccctggcgatgtaaagtctacaacgtagttgaaaacttacaagtgtgaactccgtcaggcatatgaaaaaaaagtcttgtataaggtatgtttaatcttttttgtcagcgacaatttacagaagagaatcgcggaaaccgcttcagacaagcctccgcaaggaaaattagtcacgactgaaagcattggctgggcgacaaaaaaagttccaggattaatcctaaatttacttaatgatacaaattagagtgaatttttagcccggaaagttgtctcgtggcgtgagaggatgcgcttaccggacgcataataaaccccatagcgttaccttcatttgccgcatcaacaagttcagcatgctcttcttcagtcaaatcatctgccaaccaaccgatcaccacactgtaattgcccgtgcgtaaagcgcgaaccatactctccacagtgtggcaaggggagagctggctaatctgcattactttcgttaagggtagcccagatgcctgaacccattcccgactcagtttttgttgcggtgttaaccagagttgccagcggctttgctgaccgagttgctgtaacaatggcaacagtagaagttgcgtcatcatgggctgatcttcgcgatagacaacttcactgataagcccggctgtagtgttttccgtagagacacgcgcaattttacttgctgcggaactgaagctgctagaacgatgtgcatagccactagtgtacataatcaatccagcccctgtgagttactgtatggatgtacagtacatccagtgacaacaaagatcaaccctattttcggaaagagcctcgcaaattttgtcgttggtgacgggaaaacataaattaatcttgccccttaagaataagttgcctattttcgtagttaacggatccgttaatgtgaatcattcttttatgttatgattttaaaaggaattttatgaaaagcctctcctataagcggatctataaaagtcaagaatacctggcaacgttgggcacaattgaataccgaagtttgtttggcagttacagcctgaccgttgacgacacggtgtttgcgatggtttctgatggtgagttgtatcttcgggcttgtgagcaaagtgcacagtactgtgtaaaacatccgcctgtctggctgacatataaaaagtgtggccgatccgttaccctcaattactatcgggttgatgaaagtctatggcgaaatcaactgaagctggtgcgtctgagcaaatattctctcgatgcagcgctgaaagagaaaagcacgcgcaatacccgggaaagactgaaagatttgcccaatatgtcttttcatctggaagcgattctcggggaggtggggattaaggatgtacgggcgttacgtatacttggggcaaaaatgtgttggttgcgactgcggcagcaaaacagtctggtgacagaaaagattctgtttatgcttgaaggtgccattatcggcattcatgaagctgcgctcccggtggcacgccgccaggagcttgcagaatgggctgactctcttacgccgaaacaggagtttcctgcggaacttgagtaattacgcgctaacaggagtttcctgcggaacttgagtaatctggcgttgcagacgaccaatctcaggcagtaatgcaatcaataatccaacttgttgtacgaccagaggttctttgctgtctgcccgtggttcaagttgctgcatccgctgtttcaggctagctaatgcctcattgacgcgttcttcatcagcaggttgatgatgtaacgcgtcatcaacatagcaaactgcgtcatcaagaaacgccagaatttcaggattagttaactgctcccggtgagcaccgagggcactgatatagctggtaaacgtatggttaaggcacagcaaccgaaacgcggcttcgcgaatttgcggggtaacgttcggctcgctggacatattacttaccacgctcgccagctcagcatcacggttgtgtgcatcgcggcgggcaatacgatacgccagacggttatcacgcccctgatggtattgctccagtatggcatcgagataccgacagttggcctctgtggcacgttcgagcatgcgcggcagattgcgaaactgccagtcaggccagatgtagctcactgccgcccacgcaatggcacaaccaatcagcgtatcgattacgcgaggtaacgctacttcaaaaccttcacccagtaagttaaaacacagtagcaccaaaagtgtgatgaacatcgttgcatgagcgtattgcacgttacggaaggcaaaaaagagcacgccggtaataaccagcagcaccagctgcccttccagacttggcacaaaccacagcacaggaatgccaatggcgatacctaccagcgtaccaataatccttaacttcaggcggtggcgcgtggcgttatagtttggctggcagacaaacaaacttgtcagcaagatccaatacccgtgatgcattccggttatctgaatgatggcgtagccgaagcacaacaccaggctcattcttaccgcatgacggaagagggcggattccggcgtgaagtgacggctaagacgcagccagatatcactcaacccgtgcgggctgtcatcagcgagctcattttcgtcattattatggggtagtgcctgggcctgttcactttcaattgttgccagttgggcatcaatggcgcgtaaattgttcagcaaaaatcccagtgttttgagtaaatcggcgggtgcgccgttatcgcgcatccgctccagcgcagcatcaatatgcgtaaaagcgcgctcaaaatgcggatcatgttgataaggctgacgcaacaaaatacagcgactcagttgctggcacgcctggccctgcatgctcatcagccgctgaaaacggaacagcacgtcgctgtggcgaaaatgttcacgcaatgtttgatactgaatatgagaagagctggcacgctcgtgaatatcctgtgcgacaaagtaataatgcagcgtgcgacgcgttccccgttgaccacgatcgccacgtaagcgggtcagcaggctgagtttcgtctgattcaatgtcgccatcagcagaccgttggcgagagccaaatcgtacagcggtgcctggctttgatcttcaatatcaggatcaaacatgcggctcttgagctcaagataacgcgccagttgttcatagcaacgcgccaggttgtcctgcagcgggcggaccgggaacagcagatgaccaataagtgtcaggacgttgtaccagacggcaccggccagcagatacatcggctgctgataccagtgctcatacagacttgttcccaacatagtgtaaatggcgatcagcaatgcaccgaaggcaattgttgcatagcgttgacccagaccgccgagcaaaatgaagccgctggtagagagcgttaagccaatcgcaaatagccagggccagggaaacagcaattctacactggcgctggcgataaaaaagcagaacagcgtaatgatgaggttacgcaaacgtcccgccagtcggtcatcgagatcggtcagcgccgctgccaccatccccagcgttagcggaatcgtcagttttacatcacccagccaccacggaaacgctgtggttccacaaagcgcaataaaaatacgcgcgtaatacagccaggcgctgttccaggtatagcgtttgagcaaaggacttagcataaaggccatattagtggattattcaaaacgacgacgtgcattggcttcacgcgcagcttgcgctgtttctacgcttaccacgcgacgaccaaccggccatagtgcaatagcggcaattttaaagttcgcaatgccgacaggaatgccaatgatactaatacattgtgcgatgcccgttgcaatgtgcatcaggcataaccaccagccaaagaaaatcagccagaaaatattcaataccgtaccgccagtattcagcagcacatttttgccagccgggttcagttcatcgacatgaatagcttcattgccataaggcaccagagacagtttagtgatctcccagcaggatcgtgtcagcggtaaggtaaaaatcagcacaatactgaccagagtcgccaacagccagcccagagtggtggcaaatccgccaagcacaaagttcagaatgttcaaaacggtacgcataaaacctcgctttactgtggttttcagtaatgggcggcaattgtaacgtttttttgggctggagcacgttttctctgacggttacactgataagaaataatttcgtgtggatctacagagtcatggaactgaaagcgacaacgcttggaaaacgtctggcacagcacccttacgatcgggcggtgatcctcaatgccgggattaaagtctccggcgatcgccacgaataccttattcctttcaatcaattactggcgattcactgtaagcgcggtctggtatggggcgagctggaatttgtactgccggacgaaaaagtggtgcgtctgcacggcaccgaatggggcgagacgcagcgtttttaccatcatcttgatgctcactggcggcggtggagtggcgagatgagcgaaattgcgtctggtgttttacgccagcaactggatttgattgccacgcgcactggggaaaataaatggctgacgcgtgagcaaacctctggcgtgcagcaacaaatccgccaggctttgagcgcgttgccgttgccggttaaccgactggaagaattcgataactgccgtgaggcgtggcgtaaatgtcaggcctggttgaaagatattgaaagcgctcggttgcagcataaccaggcgtataccgaagccatgcttaccgagtatgcggattttttccgccaggtcgagtctagtccgctgaatccggcgcaggcccgggcagtcgttaatggcgagcattctctgttagtgctggcaggtgcaggaagcggaaaaacgagcgtgctggtggcccgtgcaggctggttgctggcgcgtggtgaagcgtcccctgagcaaattttattgctggcgtttggtcgcaaagccgctgaagagatggacgagcggattcgcgaacggctacataccgaagacattaccgcacgcacgtttcatgcgctggcgctgcatattattcagcagggcagcaaaaaagttccgatagtcagcaaactggaaaatgataccgctgcccgtcatgaactctttattgctgagtggcgcaagcaatgcagcgaaaagaaagcgcaggcgaagggctggcggcaatggctgacggaagaaatgcagtggagtgtgccagaaggtaacttctgggatgatgaaaaattacagcgtcgccttgcctctcgcctcgatcgctgggtaagtctgatgcggatgcacggtggtgcacaggcagaaatgattgccagtgcacccgaagagattcgcgatctgttcagtaaacgtatcaagttgatggccccgttattaaaagcctggaaaggtgcgctgaaggcagaaaacgctgtcgattttagcggccttattcatcaggcgattgtgattctggagaaaggtcgctttatcagcccgtggaagcatattctggttgatgaatttcaggatatcagcccgcagcgggcagcgttgttagcggcattacgcaagcaaaacagtcagacgacgttgttcgctgttggtgatgactggcaggcgatttaccgattcagcggtgcgcaaatgagcctcaccaccgctttccatgaaaactttggtgaaggcgaacgctgtgatttagacacgacttaccgttttaacagtcgtatcggtgaggtggcaaaccggtttattcagcagaacccaggccagctgaaaaagccgctaaacagcttaaccaatggagacaaaaaagccgtcacgttattggatgagagtcaacttgacgctttgctggataagctctctggttatgccaaaccggaagagcgcattctgatcctggcgcgttaccatcacatgaggcctgccagcctggaaaaagcggcaacacgctggccgaagttgcaaatcgactttatgaccattcatgccagcaaagggcaacaggcggattacgtcatcatcgttggcttgcaggagggaagtgatggttttccggctgcggcgcgggagagcattatggaagaggcgctactgccaccggttgaggatttcccggacgctgaagaacggcggttaatgtacgtggcgctgacccgggcacgccatcgggtatgggcactgtttaacaaagagaatccctctccctttgtggaaatactgaaaaatctggatgtgccggtggcgagaaaaccgtaagaaacaggtggcgtttgccacctgtgcaatattacttcagacggtccgcgagataacgctgataatcggggatcagaatatcgaccgcgtcgttgaaatgcgggctctggattatgaagtctgccgttgccacgttggtggcgaccggaatgttccataccgtcgccagacgcagcaaggctttcacgtcaggatcgtgcggcacggcatttagtggatcccagaagaaaatcaatacatcaattttcccttcactgatcaatgcgccaacctgctggtcaccccccattgggccactcaacatcgcgttgacgttcatgccggtcgcgcgggaaattaagttaccggtagtgcctgttgcatacagtacgtgttgttccagtaacggttgatgccgttccacccagctcatcagcatttgtttgcagtgatcgtgtgccaccagcgcaatatgtttccgcgcaggtaaagtgcgagtcgtcagttccataatgtacatccgtagttaactttcctacagattactgtaagcacttatcgctgcaagataaagaccgaaaaagcctgcgcacaggcacaaaaatctcaggaagatggttgtttttccgcccactgcaggaaagtatttcgcgtttgtgggtcagccagtttaaaccaatacttcagccgttgttctgtgagcacctgagactgcggtggaatagcatccagctcggaaacaccgctaagcagcgtactgtcatctgccatcatcgtggcaaattgcggtagactagcgcgtttcgcggatttgttatagcgttcaacctcgacctcataatcaatcgtttttgccgtactggtaatggcgagaatatccagctttaccggaatcggcgtcgcatcgccatccaacaattcaaggcgcggcgcggcatcaaaatggttagcttcccgctcattctccaggcgaggcaggcgaaaattgacctggttgatgagctgggtattaaaactgaccaccagcggtggggagatatacagccgttcttcactattggaaagatgaatcgtcttctcaacgcgaaacactaactgatgcggtccattatccagttcaatgctgtccgcaccgcgcagcagagagctggaaaccttcttgccgtcgagtaccagaagatcgacatcggtactaagccgcagcgtggtggcaaaaacggataccggcaaacataatgcaatcaaggtggtcacgatgccggttttcataggtagctcctgtcaaaagaccgcccgaataataatgtgtcaaaatttttctttaatcatacttactaacatatagacatatttcccgcttttgctctcattcattcgtattagctgcatggttggcatgtcggctttgtcgtacactttgttaaacagtctggaggaaataatgaaagaaaccgatattgcaggcattttaacgtccactcacaccattgcgctggtgggggcaagcgacaaacccgatcgtcccagctatcgcgtgatgaaatatctactcgaccaggggtatcacgtcattccggttagcccaaaagttgccggcaaaacgctgctgggccagaaggggtatggcacgctggcagacgttccggaaaaagtcgatatggtcgatgttttccgtaatagtgaagcggcgtggggcgtggcacaggaagctattgccattggcgcgaaaactctctggatgcaactgggggtgattaatgagcaagcggcagtactggcacgggatgccgggttaaatgtggtgatggatcgctgcccggctattgagatccctcgcctgggcctggccaaataaaaaatccccggaaggcaaaaaccttccggggatttgttcagggattagttacgcagacgcggggcctggagttgtttgcggatggtctgcgccagctcatccatggatggctgttcaggatgttcatcctgcaattcgctacttagctgggcttcagccaggtaggtatgaaccggtaggccgttatcgtcctccatcactacgtgataccacggagcggcgcgaagctcgtcattcaccgccagctcatcagggctcggttcagagaggctataaaccgggtcgatatccacgaccactccgagataacctaacagggaatggcggacctgctggccgataccgaatttgctggcaatcatagtcacctcccgggaaatctttacctttgatataagggtaaaattccacatttcaagttacatgacgcgacaggcaaaccctttcagatatagcccttccggataggtagcgatcaccggatgatcggctgcctgacggaactgctctataaattgtacatcacgaccggcatcaattgcggcatccgcgatgattttctgaaataaatcgctggtcatcagaccggaacaggagaaagtcaggagaataccgccttcattcagcagctgaatcgccagcatgttgatgtctttataaccacgacacgcgcccatcaactggcttttattctcaacaaacttcggcgggtccatcacgataacgtcaaatttttcaccgcgatcgcgataagtacgcagcaatttaaagacatcatcacggacaaactcagccttgctcagatccagtttgttcagctcaacgttctgccgtgcaatatccagcgcttcctgggaggtatcaacgctgacaacctggctgcaaccgcccatcagtgcgcttacggcgaaaccaccggtataggagaaacagttcagcacacgtttattttcaacgtagcggcgggtagccaggcggctatcacgctggtccaggtagtagcccgttttgtgtccgtgctgaatatccaccagcagtttcattccgtgttcttcaatcggcagcagggcaggtggcaactcgccggtgacggggccctgggtcagctccattccttcttttttacgtaccgcgacgtcgctgcgatcgtaaatgctacattccgggtacagcgtttgcagggcactaattaatgccgcgcgctgatattctgccccagcactcagcagttgcagcaccagaaaattaccgaaacgatcgatagtaatacccggcaggccatcagattctccggcgattaaacgatagctgtcgaggccatctttttgcgccagccagtcacgccatttttgtgcttgttgcaaacggcgggaaaaaaaagcaatgtcgatagactcagacgggtcaaacgtccagacgcgcgcccggatttggctagctgggctataagcgccgcgtgctaaccattttccctgatgatcaacaatatcgatggtttcaccgaggctggctttaccttccatgcgggcaacggccccggaaaagacccacggatggcgacgaagtaatgatttttcgcgccctttggctaacactaaacgtacactcataatttacttttctgtcgatgcaaagaaatgggcgtcattgtccggagttttccatggatttgcaacgcgtccattaaggataaggagagcagcaatgagcaaagtctgcataattgcctgggtttacgggcgagttcagggcgtaggatttcgctacaccacacagtacgaagcgaaaagactgggtttaaccgggtacgccaaaaatcttgacgatggcagcgtggaagtggttgcttgcggtgaagaagggcaggtggaaaaattaatgcagtggttaaagagtggcggcccgcgttctgcgcgtgtagaacgggtgctcagcgagccgcatcatcccagcggggaattaaccgattttcgtatccgttaaatacattttaccggttttggcaggccagcaattttggtggcttgcttagccggacctttcggaaacagtcggtataaatagcggctgttacctttttcttcgccaaatttattcgccatcgcttttaccagcatacgaatcgccggagaagtattgaattccagatagaaatcacgcacaaaacgcaccacttcccagtgttccggactcaggctaatcccttcgttctctgcaatcaccacagccagcggctcactccactggctgctttctttgagatagccttcggtatccgtttctatctctttaccttcgaagatcagcataattattactaccttaatcagactggcggcagtgtaacaaaaaacaaagccccgcataaagcgaggctatgaaagtgttagcgggtgagattaatcgcggctagcgaagcccagaatgctcagcaggctgacgaagatgttgtacaggctaacatacaggctaaccgtggcacgaatatagttcgtctcaccgccatgaatgatgttgctggtttcaaacaagatagcgccagaggagatcagaatgaagaccgcgctgatcgccagatgcagagcaggcagctgcaggaagatattcgcaaccataccaatcagcaccaccacaatacccgccatcagcataccgccgaggaagctcatatctttgcgggtggtcagcacatatgcagagcagcagaagaacactaacgccgttccgcccagtgccatagcgattacgtcacccattccggcagacagataggtgttcagaataggtccgaggatataacccagaaaaccggtaaaggcgaatgcggagataatcccggtcggcttattcgccgttttataggtcaggaacatcaaaccatacatacccaccagcgtcagaatcagacccggagatggcagcatcagcaccgtactggcagttgcggtaatcgcgctaaaggccagcgtcaggctcagcagaaaataggtattacgcagcaccttatgggtgctaagcagacttgtacggtcatgactagaactaacaatacgatccattgagtcactctctatgacagatgtaattaattaagcagcataatgataatgcgtaagggcacccagaagttttacccatctttacgcatttgatctggaacaggtttaacagcggattatcaggtcattaagcaaatataacgccctgagaatttcgacaggcaaaagaaaaaggggttagcatttagctaaccccttatcttattggaatgacgcgcactataaacatcccgatgcggcgtgtaaacccctaatttgtttgtttgcctgaaaaacagccaaaagtgcattgatagcgtgaaataacagcagattgatcatttcatcaccatgaattccttctcttttactcgtttagcaaccggctaaacatccccaccgcccggccaaaagaaaaataggtccatttttatcgctaaaagataaatccacacagtttgtattgttttgtgcaaaagtttcactacgctttattaacaatactttctggcgacgtgcgccagtgcagaaggatgagctttcgttttcagcatctcacgtgaagcgatggtttgccttgctacagggacgtcgcttgccgaccataagcgcccggtgtcctgccggtgtcgcaaggaggagagacgtgcgatatgaataacgaggaaacattttaccaggccatgcggcgtcagggcgttacccggcgcagctttctcaaatattgtagtctggctgccacgagcctgggattaggcgcgggaatggcaccaaagattgcctgggcgctggagaacaaaccgcgcattccggtggtatggatccacggtctggaatgcacctgctgtaccgaatcttttatccgctccgctcacccactggcgaaggacgtcatcctttccctgatttccctcgattacgacgatactttgatggctgccgccggaacccaggcggaagaagtctttgaagacatcatcacgcaatacaatggcaaatatatcctcgcagtagaaggtaatccgccgctgggcgagcaggggatgttctgtatcagcagcggtcgaccgtttattgagaaactcaaacgtgccgctgccggagccagcgcgattatcgcctggggaacctgcgcgtcctggggctgcgtgcaggccgcgcgacccaatccgacgcaggcaacgcctatcgacaaagtcatcaccgacaaacccattatcaaagtacctggctgcccgccgatcccggatgtgatgagcgccatcattacttacatggtgacctttgatcgcttgccagatgtcgacagaatgggccgtccgctgatgttctatggtcagcgaatccacgataaatgctatcgccgcgcccacttcgacgccggagagttcgtccagagttgggatgatgacgctgcccgcaaaggttactgcctgtacaaaatgggctgcaaagggcctaccacctataacgcctgttcctccacacgctggaatgatggcgtttctttcccaatccagtctggtcacggctgcctgggctgtgcggaaaatggtttctgggatcgcggtagcttctacagccgcgtggtcgatattccgcaaatgggtactcattccaccgccgataccgtcggtttaaccgcgcttggcgtggtggcagcggctgttggtgtgcacgcagtcgccagcgccgttgaccagcgcagacgtcataaccagcaacctacagaaaccgaacatcagccaggcaatgaggataaacaggcatgagcactcagtacgaaactcagggatacaccatcaataatgccggacgccgcctggtggtcgacccgattacgcgcatcgaaggccacatgcgctgcgaagtgaatattaacgatcagaatgtgatcaccaatgccgtctcctgcggcaccatgtttcgcgggctggagatcatcctacaagggcgcgacccgcgcgatgcgtgggcgttcgttgaacgtatctgcggcgtctgtactggcgtacacgccctggctagcgtttacgccatcgaagatgctatcggtattaaagtgccggacaacgccaatatcatccgcaacattatgctggcaacgctctggtgccacgatcatctggtgcacttctatcagcttgccgggatggactggatcgatgtgttagatgcgctgaaagccgacccgcggaaaacttccgaactggcgcaaagtctctcctcttggccgaaaagttcccctggctatttcttcgacgtacaaaaccgcctgaaaaaatttgttgaaggcgggcagttggggatcttccgcaatggctactgggggcacccgcagtacaaactgccgccagaagctaacctgatgggctttgcccactatctcgaagctctcgatttccagcgtgaaattgtcaaaatccacgcggtctttggcggtaaaaacccgcatccaaactggattgtcggcgggatgccttgcgccatcaacattgacgaaagcggcgcggtcggggcagtcaatatggaacgcctgaacctggtgcagagtattatcacccgcacggcggacttcattaacaacgtgatgatccccgacgccttagccatcggtcagttcaacaaaccgtggagcgaaatcggcactggtctttctgataaatgcgttctcagctacggcgcattcccggatattgccaacgactttggcgagaaaagtctgctgatgcctggcggcgcggtgattaacggcgacttcaacaatgtgctgccagtggatttggttgatccgcagcaggtgcaggagtttgtcgaccacgcctggtatcgatatcccaacgatcaggtcgggcgtcatccgttcgatggcatcaccgacccgtggtacaaccccggcgatgtcaaaggcagcgataccaacattcagcagctgaatgaacaggaacgctacagctggatcaaagcgccacgctggcgcggtaacgcgatggaagtggggccgctggcgcgcacgttaatcgcttatcacaaaggcgatgctgcgaccgttgagagcgtcgatcgcatgatgagcgcgttgaacctgccgctttccggtatccagagtacgttaggccgcattttgtgccgcgcgcacgaagcgcagtgggccgcaggtaagttgcagtatttcttcgacaagctgatgaccaacctgaaaaacggcaatctcgccactgcttccacggaaaaatgggaacctgcaacctggccgacagagtgccgtggtgtcggttttaccgaagcgccgcgcggggcgttaggccactgggccgccattcgcgatggcaagattgatctctaccagtgcgtggtgccgaccacctggaacgccagcccgcgcgatcccaaagggcagattggcgcttatgaagcggcgctgatgaacaccaaaatggcgatccccgagcaaccgctggagatcctgcgtactctgcacagctttgacccgtgcctcgcctgtagtacacacgtgctgggcgacgacggtagcgagctgatctccgtgcaggtgcgttaacagcgaaggagaatcatcatgcaacagaaaagcgacaacgttgtcagccactatgtctttgaagcgccagtgcgcatctggcactggttgacggtgttatgcatggcggtgttgatggtcaccggatactttatcggcaagccgctaccttccgtcagcggcgaggcgacgtatctgttctatatgggctacatcaggttaattcacttcagcgccgggatggtttttaccgtggttttgctgatgcggatctactgggcttttgttggcaatcgatactcccgcgagctgtttatcgtgccggtatggcgtaaaagctggtggcagggcgtgtggtatgaaatccgctggtatctgtttctggcaaaacgtccgagtgccgatataggccataatcccatcgcccaggcggcgatgttcggctatttcctgatgagcgtctttatgatcatcactggttttgcgctgtacagcgaacacagccagtacgctatttttgcgccgttccgttatgtggtggaatttttctactggacgggtggcaacagtatggacattcacagctggcatcggctggggatgtggctgattggcgcgtttgtgatcggtcatgtctacatggcgctgcgtgaagacatcatgtccgacgacacggtgatctccaccatggtcaacggctaccgtagccacaaatttggcaaaataagtaacaaggagcgtagttgagctaaataagtaacaaggagcgttcatgagcgagcaacgcgtggtggtcatggggctgggcaacctgctgtgggccgatgaaggcttcggcgtgcgggtggcggaacggctgtatgcccattaccactggcccgagtatgtggagattgtcgatggcggtactcagggactgaacttgctggggtatgtcgaaagcgccagccatctgttgattctcgatgccattgactacgggctggaacctggaacgctgcgaacctatgccggagaacgcattccggcttatctcagcgcgaagaaaatgagcctgcatcagaacagtttctccgaagtgttggcgctggcggatatccgcggacatctgccagcacatattgccctcgtcggtctgcaacccgcaatgctcgacgactacggcggtagcctgagcgaactggcacgggagcaactgcccgctgcggaacaggcggcgctggcgcagcttgctgcgtggggaattgtgccgcaaccggctaatgaaagccgctgtctcaattatgactgtctgagcatggaaaattacgaaggcgttcgcttgcgccagtaccggatgacacaggaggagcagggatgagcaacgacacgccatttgatgcgttgtggcaacgaatgctggcgcgcggctggacgccagtcagtgaatcccgtcttgacgactggcttacgcaagcgccagacggcgtggtgttattaagcagtgacccgaaacgcacgccagaggtcagcgataatccggtaatgattggcgaattactgcgcgagtttcccgactatacatggcaggtggcgattgctgaccttgagcagagcgaagccatcggcgatcgctttggcgtctttcgctttcctgccactttagtgtttaccggcggaaactatcgcggcgtgctgaatggtattcacccgtgggcggaactgataaacctgatgcgcgggcttgtcgaaccgcagcaggagcgtgccagttgatctaaccgcagcaggagcgtgcctcatgagcgaaacttttttccatctgctggggccaggaacgcaaccgaacgatgacagtttcagcatgaatccactgccgatcacctgtcaggtgaatgatgaaccgagtatggcggccctggagcaatgtgctcacagcccgcaggtgattgcgctgttaaacgagttacaacatcaactaagcgaacgccaaccgccgttgggcgaggtgctggcagtcgatctgttaaatctcaacgccgacgatcgtcactttatcaatacgcttctcggggaaggggaagtgagtgtgcgcattcagcaggctgacgacagtgaaagtgaaatacaggaggcgatcttctgcggattatggcgggtgcgcagacgtcgcggcgaaaagttgctggaggacaaactggaggctggctgcgcgccgctggcgttgtggcaggcggcaacgcaaaatctcttgccgacagatagcctgttaccgccgcccattgatggcctgatgaatggcctaccgttggcgcatgagttactggcacatgtacgtaaccccgacgcgcagccgcacagcattaatctgacgcaattacccatcagcgaggctgatcggctttttctcagtcgtctctgtgggccgggaaatattcagattcgtaccattggctatggcgagagctatatcaacgccacggggttacgccatgtctggcatttacgctgtacggacaccttaaaaggcccgttactggaaagttatgaaatctgcccaataccggaagtggtgctggcagcgccagaagatttggtcgactctgcgcagcggcttagcgaggtatgtcagtggctggcggaagctgcaccgacgtaaaaagacggtaagtatcgctttcagtcttatgaatatcgcaatcggcgaatacctctggtcgtagagtttcaggataaagagggagatctaccattatcgggttatttttctctcttcgcctacaggagtgcgcatgtgggatgtcattgatttaagccgctggcagtttgctctgaccgcgctgtatcactttttatttgtaccccttaccctggggctgattttttttgctggctattatggaaaccatttacgtggtcaccggcaaaacaatctaccgcgatatgacgcgcttctggggtaagctcttcggtatcaattttgctcttggcgtggctaccggcctgaccatggagtttcagtttggtactaactggagtttctattccaactatgtgggcgatatttttggcgcaccgctggcgatggaagcattaatggccttcttcctcgaatccacctttgtcgggctgttcttcttcggctggcaacggctgaataaataccagcacctgctggtgacgtggctggtggcgttcggtagtaatctctctgcgttgtggatattgaatgccaacggttggatgcaatacccgaccggtgcgcattttgatatcgacaccctgcgtatggagatgaccagcttcagcgagctggtctttaatccggtcagccaggtgaaatttgtgcacaccgtaatggcgggctacgtgaccggggccatgtttattatggcgatcagcgcctggtatttactgcgcggacgggagcgcaatgtcgcattacgcagctttgccatcggttccgtcttcggtactctggcgattatcggtaccctgcaactcggagacagttctgcgtatgaagtcgcgcaagtacaaccggtaaaactggcggcgatggaaggggagtggcaaacggaacctgcacctgcaccgttccatgtggttgcctggccggaacaggatcaagagcgtaacgcctttgccctcaaaattcccgcgctgctagggatcctcgccactcacagtttagataaacccgtgccgggtctgaagaatttgatggctgaaacctacccacgcttgcaacgcggacgtatggcctggctgttaatgcaggaaataagccaaggcaatcgtgagccgcatgtgttgcaggcattccggggactggaaggtgacctgggctacggcatgttgctctcccgctatgcgccggatatgaatcatgtcacagccgcacagtaccaggcggcgatgcgtggcgcgatacctcaggttgcgccggtattctggagtttccgcatcatggtgggctgtggttccctgctgctactggtgatgctgattgcgcttgtccagacgctgcgtggcaaaatcgaccagcatcgctgggtgctgaaaatggcgctctggagtttgccgttgccgtggattgcgattgaagccgggtggtttatgaccgagtttggtcgtcagccgtgggcgatacaggacatcttaccgacatactccgcgcactccgctttaaccacaggacaactggctttcagtctgatcatgatcgtagggctttacaccctgttcttaatcgccgaagtctacctgatgcagaaatatgcccgtctggggccgagcgcgatgcagagtgaacaaccgacgcagcaacaggggtaaaggagaaaatcatgtttgattatgaaacattgcgcttcatctggtggctgctgattggcgtgatcctggtggtctttatgatctccgacggatttgacatggggatcggctgtctgctgccgctggtggcgcgtaatgatgatgaacgccggatagtgataaacagcgttggtgcacactgggaaggcaaccaggtctggttgatcctcgctggtggggcattatttgccgcctggcccagagtgtatgcagcggcgttttccggcttttatgtggcgatgatcctggtgctgtgcagtctgttcttccgcccgctggcctttgattatcgcggaaaaatcgccgatgcacgctggcgtaaaatgtgggacgccggtctggtcatcggcagtctggtgccgccggtagtcttcggtatcgccttcggcaacttgttgctcggcgtgccgtttgccttcacaccgcaattacgcgtggagtatctcggcagcttctggcaactgctgacgccattccctttattgtgcggattgctcagccttgggatggtgattttgcaaggtggcgtctggttacaactgaaaactgttggtgtgattcatctgcgtagtcagctggcgaccaaacgcgctgcactgttggtgatgctgtgctttttgctggcgggttactggctgtgggtcggtattgatggctttgtactgctcgcccaggatgctaacggtccttccaatccgttaatgaaactggtggcagtgctacctggtgcctggatgaataattttgtcgagagccccgttttgtggatcttcccgctgctgggattcttctgcccattgctgacggtgatggcgatttatcgtggtcgcccgggttggggatttttgatggcaagtttgatgcaatttggcgtgattttcacggcaggcatcacgctgttcccctttgtcatgccgagtagcgtgagtccgatctccagcctgacgttgtgggacagtacttccagtcagctgacgctgagcattatgttggtaatcgtgctgatatttttgcccattgtgttgctctacactctctggagctactacaaaatgtgggggcgcatgacaacagaaactctccgccgtaacgaaaacgagttgtactaaggagcagaaacaatgtggtatttactttggttcgtcggcattttgttgatgtgttcgctctccacccttgtgttggtatggctggacccgcgtctgaaaagttaacgaacgtaggcctgatgcggcgcattagcatcgcatcaggcaatcaataatgtcagatatgaaaagcggaaacatatcgatgaaagcgatcttaatcccatttttatctcttctgattccgttaaccccgcaatctgcattcgctcagagtgagccggagctgaagctggaaagtgtggtgattgtcagtcgtcatggtgtgcgtgctccaaccaaggccacgcaactgatgcaggatgtcaccccagacgcatggccaacctggccggtaaaactgggttggctgacaccgcgcggtggtgagctaatcgcctatctcggacattaccaacgccagcgtctggtagccgacggattgctggcgaaaaagggctgcccgcagtctggtcaggtcgcgattattgctgatgtcgacgagcgtacccgtaaaacaggcgaagccttcgccgccgggctggcacctgactgtgcaataaccgtacatacccaggcagatacgtccagtcccgatccgttatttaatcctctaaaaactggcgtttgccaactggataacgcgaacgtgactgacgcgatcctcagcagggcaggagggagtattgctgactttaccgggcatcggcaaacggcgtttcgcgaactggaacgggtgcttaattttccgcaaagtaacttgtgccttaaacgtgagaaacaggacgaaagctgtagtttaacgcaggcattaccaagcgaactcaaggtgagcgccgacaatgtcagtttaaccggtgcggtaagcctcgcaagtatgctgacggagatatttctcctgcaacaagcacagggaatgccggagccggggtggggaaggatcaccgatagtcaccagtggaacaccttgctaagtttgcataacgcgcaattttatttgctacaacgcacgccagaggttgcccgcagccgcgccaccccgttattagatttgatcaagacagcgttgacgccccatccaccgcaaaaacaggcgtatggtgtgacattacccactagtgtgctgtttatcgccggacacgatactaatctggcaaatctcggcggcgcactggagctcaactggacgcttcccggtcagccggataacacgccgccaggtggtgaactggtgtttgaacgctggcgtcggctaagcgataacagccagtggattcaggttagcctggtcttccagactttacagcagatgcgtgataaaacgccgctgagtttaaatacgccgcccggagaggtgaaactgaccctggcaggatgtgaagagcgaaatgcgcagggcatgtgtagcttggcaggttttacgcaaatcgtgaatgaagcacgcataccggcgtgcagtttgtaatgcataaaaaagagcattcagttacctgaatgctctgaggctgatgacaaacgaagaactgtctaatgcgtagaccggaaaaggcgttcacgccgcatccggccactttcagtttgcaatacgtacgcttgagatcaggattgtctactttgagtataacatccttgtgaaatctccctttcctcataccgcttgcactatatactgcgggtaggaaaggcgcgcagagggaaatataagattgttaactatccccctctggaaatacgacttgtgagcataagataaatcttagcaaaatacaaattaaagataaggaaattgttacgaaagctattaattattgttggtaatatagtttcaagtggtactataactggctgttaaatggcatttataactattaggtgcagagatattcgcttaaatggattagtttctttgtggaaaagtaactgatgttataatgtatgatgttgactatttcactattccaataaaaccagtcagctttaaacaagcagcgtcatattaagagagataaacatttgccgctgttggtcctcgcaggccatttacgcggcaaaattccacacgtaatcctggtataagcacttctgcgtcgcggggagtgaatgcggaaatatggacctgaacttctttacgaccgtcggaggggataatgaatcctttgccgcttttgcgatcaaaggttttgacaattcctgtcattttacgggacaaacaaattccttactgaaaatactgcgctgcactatacggggttaataaaataaagccagcgatatttaagaccgccggacggctaaaataaaatttgcttaatctcaattatcatgcgttaatagctgcgtcggtttgaaagacagacagcatacaaagtagtttactaaagcagttctcattatcaggcattatccccttcttttgagtctctctcctgaacactaagtagtttctgtattaaagccctgtttgccgaaaggcccaaaatgaaggaagtaaaatatgtctaataaaatgactggtttagtaaaatggtttaacgcagataaaggttttggctttatcactcctgatgatggcagcaaagacgttttcgtccatttcaccgccatccagagcaatgaattccgcacgctgaacgaaaatcagaaagttgaattttctattgagcaggggcaacgtggccccgcggcagcgaacgttgttacgctctaaggttgccattattactcaacatctccatttccgctgtccatgttgtcatggttcacagtaccgcacatcggcattcgatgtgacggagcgaaaccctttgggcgctaagtgtattttttgtaaatcgacgatgatcacctttgataacgtcgcgctgcaaatacgcactgaccatgcgccgctggattagtcaaaataatatcaggctccctcgtggagccttttttatatctgccttatttttcttcaacgctgtatgtatagtaagcgataacctgttgattattgaatctttcggggagatggcttataacatttcttacctgaccagggtaccgggaaccaacaccttactggcgtgttgctgtcttttaagaccagaagaggttaacagtgaatattgaagagttaaaaaaacaagccgaaacggaaatcgccgactttatcgcgcaaaaaatcgccgagctgaacaagaatacagggaaagaagtctctgaaattcgcttcaccgcacgagaaaaaatgaccgggcttgaaagttatgatgtcaaaatcaaaataatgtgattttgtgaacatcaccccgtgcgaggtgatgttccgcttgttgctaatttagtgaccaatcattggcgcttgtggaattaagcgtcggtacaattcctccggcaccgggctttgccatactcccgcatacattgcgtaaccaatcaccgcaaacataatccccagaaccagtagcgtcattaaccagccagacaacgcaaaggcttttttatttgccgcaggtttttgcagactaaaggtcaatgtactggctaccggacaactctctacgcaagtcatacagccggtacattccactgttcgtacctgaattaatttatcgaccgggatccgacttgggcaattttttgcgcatttgccacagtcgatacaactttcggcattgcgacgaatcttaaacgggctcaataggctaaccacgcccatcagcgcgccatatgggcaaagataacgacaccaggcatggcgaataaacaggctggcaatcagcaaaacggtcacgctgattaatgtcgcggtccccatatgacgaaagaaatcgagcattttaacgtccatcaccacgctgtaggggctcaacataaaatagtgaatcgcctgagcgggcatcaataacgcgatatagataaaaaaactcaacagcaaatacttcacgccgcgcagaggaatatccagccagcggggaaggacacattgccgaccaaacagtttgttaccgagatcgccgattaattcagaaagcgtaccaaccgggcataaccaactgcaaaaggcctttttgagtaatagactgatgacgataaaagcgaccaataacagcatcgcggcggcgtggacggacggtaactgacctgttacaaggctatatttcagattcatcagcccggcaatcggtagccagccttcgatacctcccggtctggcgacaaatgtcgtgctacttgccgtttcgtaatagcgcacccaataccagaacgtgatggcaatataaatattcattgccaacagtaataattgcgtcgctttacgccaggtcgtggcattacgccagtcattccacggtaatttgccgcccgtcgtgcctggccgccgctgccagcgggttcttttattctctgccatgattttgccagtccgttaagttgtataccaaatgccactattctagttgttcttaactggctgatattgattcaaatcgcgttcaggtctttcttatgcaaccatgcttccagagcggcaacactgcgtgtaatttcttcgtgtggaaggggggcagataatggctgctgctccagttgtgcgcatagctggctggcgatatgcattcccagactgctgcaactgctttttagctgatgcgcggcacgctttattttctcgctatcctgactggcgcgggcaatgtcgatttcatcgagaagcggcagggcatgttgtgtaaataataccagccattcgtggatcttctccgtccccattaactgagcatcttcattgagttggcttacatccaggctttgatcattattgacttgcagttggagatagtgcgccagtaactgaccgagcacttcacgcggcaccggtttagggataatcccgcggaataaactactggtacgctggcgcagcgtttcgtcaatgacatgggcgctaaagccaatcaaaaccaggctcggatattgctgtgccagttgtcgggcaagcgtaatgccgtcgatatccggcagatcaaaatccaccagtgcggcagcaaacggttcgctattttgcagtgtctctaaagcctgcgcggcattgccaacagcaacaatctgcgcaccactggttttcagcatctcaatggtaattcgctgggttagcgggttatcttcaattaacagcaaacgtaaaccgtcaagacgcaccgcctgattgactgtttttggcacgggtgccgtggcaacacgtaacggcaagcgtaaacaaaaacagcttccaacctccggcgtgctggtggcgctcagttcgccgcccatcgcctgggccagacggctactgatagtcagtcccagcccggtgccgccgcgtttgccgcttacctgcacaaatggctggaagatttctgccagtttcgcgggatcaataccgcagccgctgtcttccacttcgaccagccattgctcgccatcagtgcgactacgcaggataatgtacccttcgtcagtaaaacgcagggcgttgctcaacaggttggttataacctgacgaatacgtcgtggatcgcccattaacgcgcacggcatatcatcggcaattgccgttgccaggcgaatcgggcgacctttcacccgtccgctcattaattgcagggtactttccagcagcgggcgcggttcaaagggctcatcgctgacgctaacattcttgccacctgcttcgatagcggaataatcgagaatatcgttgaggatggtcagcaagctttcaccagagtcagtaattgcccgcaaatcatcacgctgggcgttaagtgcggggttatctgccagcagttgagcagtgccgagaataccgtacagcggtgtgcggatctcatggctcatcgccgccagaaacgcgctttttgcctggctggctttttctgcttccgcccgtgcctgtcggtgttctatcaccagttcctgcaattcagctgtacgcgctttgacctgcgccgccagctgttcgcggtggcgattcagtgcatgaacattgctgcgaaacgcatccatcagccgcccgatggtatccagctcccgtacgccagcggtttccgggaaaggggagtcaatatcaccgtccagcagccgttgcagcgcctgcgtttgttcggcaagtggacgcgtgacactgcgataaaccacgcgccagaggatcagaatcagtgcgcaaagactaaccatccccagcaataacaggctgtattgcccgcgtgcactcgctttttccagatgcgccagtccgtgctgattacgcagctcaatggtgtcgaccagctgactgacttcgctactaaactgcgcgaactgggcgatgttattttgtgcgagagtttgtaggtgattgctgatttcactgtcctgctgatacagcgccagcaaatcgctatattggctaacggtagttaacgttgttgcgacctgcgcacgaacacccggatcttcaatgcgtatttgccgacgttgcagaattttcaccgcattattgagctgcttttccagcgttggtgcatttttctggatctgctccagccccagattcatcaccatttgctgcacccgcagagcgctaaggcgcagttcattcatctggttaacatactcaagatcgatatcaatcagccgatcgagtgcactttcagcagcctgacgctgatcttgttcgatcaaatcgtaaatcccggcctgggtcgctccagcggaagttgtcgcattattcgcctgaccttgcgccaggcgtgcgatctcatcggcggcagcgactatctgctgactgagttgctgttgttgctggcgcagttgcaaacgctgccccaccagttccccttgctgacgtaagctacgggagatctcctgctcctgttgttcaatagcggtggtatcaaaaccttgttcccgtaacgcttgcagcaacgcattaatcttcaggctttgtgcggtgagcattcgcccctgcgcctgccacatcttttcgttatcggcactggtcaggttctgcgcggcgaaaagttcccaggcgctggcttcgctcaactggcgcgccatattcatggtaggaatcaatgcctgagtgttgtctttttccacctggctgataaagcgcaggttgtaccatcccaccagggtactggtcagggttaacagcgccatcagggcaaagcccatccagagtcttcgggtcagggttaaattcacggtcggtgcactttaggtgaaaaaggttgagtcgcaaagcggaatgcatctagcataaagccttattattgatgaggctatcatgcgcgtactgctatttttacttctttcccttttcatgttgccggcatttagcgctgataacctgttgcgctggcatgatgcgcagcatttcacggtgcaagcctctacgccgcttaaagccaaacgcgcatggaaactgtgcgcgctttatcccagcctgaaagatagttattggttaagcttgaactatggtatgcaggaggctgctcgccgctacggtgtggatttaaaagtgctggaggcaggcggctacagccagttggctacccagcaagcacaaatcgaccagtgtaaacagtggggcgcagaggccattttgctcggtagtagcacgaccagttttcccgacctgcaaaagcaggtagcaagtctgccggtgatcgaactggtaaatgctattgatgctccccaggtgaaaagccgcgttggtgtgccctggtttcagatgggctatcaaccggggcgatatctggtgcaatgggcgcacggtaaaccactgaatgtgctgttgatgcccggacccgataacgccgggggcagtaaggagatggtcgagggttttcgcgcagccattgccggaagcccggtgcgtattgttgatattgcgcttggtgataacgatattgaaatccagcgtaacctgttgcaggagatgctggaacgccatccagaaatcgacgtcgttgccggaacggccattgcggcagaggcggcaatgggggaagggcgtaacctgaaaacgccgcttaccgtggtgagcttttatcttagtcatcaggtgtatcgcgggctgaagcggggaagagtgattatggctgccagcgatcaaatggtctggcagggggaactggcggttgagcaggccatcaggcaattacaggggcaaagcgtttctgataatgtcagcccaccgattttagttctgacgccgaaaaatgccgaccgtgaacatattcgccgcagcctgagtccagggggatttcgtccggtctatttttatcagcacacaagtgcggctaagaaataatcagcacacatcagcggctaagaaataaccttcaccatgttgcgtcaccagtaaatccgcgctgagtttatgacgtaaacgacgaattaacacatcgacggtgcgcaggtcagggttttccacccgacgcgcagaaagcatacgtagcagacgttcacggctgagaatttcgcccggattcgtcacaaatgccaccaacatttcatactctgcgcgggtcagtttaatcggctcgccatcccgctccagcgtatggcggctcacattcaggcaataaccggcaaagcgatagcagttgtcctgagtgtgcggttgagcttgtcgcgcgaggtcgattcgccagagcagatttttcacccgtactaccagttcgcgcagttccagcggtttggtgacgtaatcgtctgcgcccatttccagcccaacaatacggtcaatccgatcgctgcgtccggtaaccagaataatccccaccgtactgcgttctcgcagggcgcgggttaacatcaggccattttcatcgggtaagttgatatccagcagaattaaatctacgctctgattctgcataatttcccgtagcccagcaccgctcgccgtaacggaaacggtatacccctcctgagtgaagtaggattgtaatcgcgcctgggtaaccggctcatcttcaacaataacaatgtgatgtggcatcagagggttttactcattctgttcatatctgttcatattctgccgtaagccgttcatcctgaccagtgccgctgttcatatttgctcattaagatcgcttcactaaaccataattctacaggggttattatgcggaaactctggaacgcgctacgccgacccagtgctcgttggagcgtactggcgctggtcgcaattgggattgtgattggcattgcgctgattgtattgccacacgttgggatcaaagtcaccagcacaaccgaattttgtgtcagttgccacagtatgcaaccggtgtatgaagaatataaacagagcgtgcatttccagaacgcctccggcgtgcgagctgaatgccatgactgtcatatcccgccggatattccaggcatggtgaagcgcaaactggaagcgagcaatgatatctaccagacctttattgctcactccattgatacacctgaaaaattcgaagccaaacgcgcggaacttgccgagcgtgaatgggcgcgaatgaaagaaaacaacagcgcaacctgccgctcctgccataactacgatgcgatggatcatgcgaagcagcatcctgaagcagcacgtcagatgaaggtggcagcgaaagataatcaatcctgcatcgactgtcataaaggtattgcccaccagttaccggatatgagtagcggcttccgtaagcagttcgatgagctgcgcgccagtgctaatgacagtggtgacacgctgtactctattgatattaagccaatttatgcggcgaaaggcgataaagaagcctctggttctctgctgcctgctagcgaagtgaaagtccttaaacgtgacggcgactggctgcaaattgaaattaccggctggacggaaagcgccggacgtcagcgtgtactcacccaattcccaggtaaacgcatctttgttgccagcattcgtggtgatgtgcagcagcaggtaaaaacgctggagaaaaccaccgttgccgacaccaataccgagtggagcaagttgcaggccactgcgtggatgaagaaaggcgacatggtgaacgatatcaaaccgatctgggcttatgcggatagcttgtacaacggcacctgtaaccagtgccacggcgcaccggaaatcgcccactttgacgctaacggttggatcggcacgctcaacggcatgattggctttaccagtctcgataaacgtgaagaacgcaccttgttgaaatatctgcaaatgaatgcgtctgacaccgcaggtaaggctcacggcgataagaaggaagaaaaataatgaacaataacgatctctttcaggcaagtcgtcggcgttttctggcacaactcggcggcttaaccgtcgccgggatgctggggccgagtttgttaacgccgcgacgtgcgactgcggcgcaagcggcgactgacgctgtcatcagcaaagagggcattcttaccgggagccactggggggctatccgcgcgacggtgaaggatggtcgctttgtggcggcaaaaccgttcgaactggataaatatccgagcaaaatgattgccggattgccggatcacgtacacaacgcggcgcgtattcgttatccgatggtacgcgtggactggctgcgtaagcgccatctcagcgatacctcccagcgcggtgataaccgttttgtgcgcgtgagctgggatgaagccctcgacatgttctatgaagaactggaacgcgtgcagaaaactcacgggccgagtgccttgctgaccgccagtggttggcaaagcacggggatgttccataacgctagcgggatgctggcgaaagctattgccttgcatggtaatagcgttggtacgggcggagattactctaccggtgctgcgcaggtgatcctgccgcgcgtagtcggtagcatggaagtgtatgaacagcaaacctcctggccgctggtattgcagaacagcaaaaccattgtgctgtggggctccgatttgctgaaaaaccagcaagcgaactggtggtgcccggatcacgatgtttatgaatattacgcgcagctaaaagcgaaagtcgccgccggtgaaattgaggtcatcagcatcgatccggttgtcacatccacccatgagtatctggggcgcgagcatgtgaagcacattgcggttaacccgcaaactgacgtgccgctgcaactggcgctggcacatacgctgtacagtgaaaacctgtacgacaaaaacttccttgctaactactgtgtgggttttgagcagttcctgccgtatctgctgggtgagaaagacggtcagccgaaagatgccgcatgggctgaaaaactgaccggcattgatgccgaaaccattcgtgggctggcgcggcagatggcggcgaacagaacgcaaattattgctggctggtgcgtgcagcgtatgcagcacggtgaacagtgggcgtggatgattgtggttctggcggcgatgctggggcaaattggcctgccaggtggtggttttggttttggctggcactacaacggcgcaggcacgccggggcgtaaaggcgttattctgagtggtttctccggctctacgagcattccgcctgttcacgacaacagtgactacaaaggctacagcagcactattccgattgcccgttttatcgatgcgatcctcgaaccggggaaagtgatcaactggaacggtaaaagcgtaaaactgccgccgctgaaaatgtgtatttttgccggaactaacccattccatcgccatcagcagatcaaccgcattattgaaggcttgcgcaagctggaaacggttatcgccatagataaccagtggaccagtacctgccgctttgccgatatcgtactgcctgcgaccacgcagtttgagcgtaacgatctcgaccagtacggcaatcactccaaccgtggcattatcgccatgaaacaggtggtgccgccgcagttcgaggcgcgcaacgacttcgatattttccgcgagctgtgccgtcgctttaatcgcgaagaagcctttaccgaagggctggacgaaatgggctggctgaaacgcatctggcaggaaggtgtacagcaaggcaaaggacgcggcgttcatctgccagcgtttgatgacttctggaataacaaagagtacgtcgagtttgaccatccgcagatgtttgttcgccaccaggcattccgcgaagatccggatctcgaaccgctgggcacgccgagtggcctgattgagatctacagcaaaactatcgccgatatgaactacgacgattgtcaggggcatccgatgtggtttgagaaaatcgaacgctcccacggtgggcctggcagccaaaagtatccgttgcatctgcaatctgtgcatccggatttccgacttcacagccagttatgtgagagcgaaacgctgcgtcagcaatatacggtagcgggtaaagagccagtattcattaacccgcaggatgccagcgcgcgcggtattcgtaacggtgatgtggtacgcgtctttaacgctcgcggtcaggtgttggcaggggcagtggtttctgaccgctatgcacccggcgtggcacgaattcacgaaggggcatggtacgatccagataaaggcggcgagcctggtgcgctgtgcaaatacggtaaccccaacgtgttgaccatcgacatcggtacaagccagctggcgcaggcgaccagtgcgcacactacgctggtggaaattgagaagtacaacggaacagtggagcaggtgacggcgtttaacggccccgtggagatggtggcgcagtgcgaatatgttcccgcgagccaggtgaaaagttgaattaacccgcgtcgcaggtgaaatcatgaccacgctgacagcacaacagattgcctgtgtttacgcctggctagcgcagttgttctcccgtgagctggacgatgaacaactgacgcaaatcgccagtgcgcagatggctgaatggtttagcttgctgaaaagcgaaccgccgctcactgcggcggtgaacgagctggaaaaccgtattgccacgctgacagtacgtgacgatgcccgtctggaactggccgcggacttttgcggcctgtttctgatgaccgacaaacaagcggcgctgccgtatgcaagcgcctacaaacaggacgagcaagagattaaacgcttgttagttgaggcagggatggaaaccagcggcaatttcaacgaaccggcagatcatctggcgatctatctcgaattgctcagccatctgcattttagcctgggagaggggaccgttcctgcgcgaagaatcgacagtttgcggcaaaaaacactgacggcgctgtggcaatggttaccagagtttgttgcgcgttgtcgtcagtatgacagctttggtttttacgcggcactaagccagttattgctggtgttagtggagtgcgaccaccaaaacagataacgtcgtttgtgcgcctgaaaagacgcgtttagcgtcgcatcaggcattatggcgcagttgccggatgcggcgtgaacgtcttatccggcccacaggaactgtaatctttgtagaccggttaagatgcgtcatcgcatccggcaaacacacatcacggatgagctacaaaccgggaaagccgctggcgcagcaggcggttttcctgcttcaggtgcgcaatatcatccattaacgtcagcgccaccgcgatccccggccagtccagagccagttcatgacgcaggcgtaccgcgcgttgcaccacaatggcggcatggtcgtcaaatacccaggttgtttcctggatctcacgcggttcaaccacccccaaaccgacaatttcattcaactcctcttcagagatgccggtatgcaggcaaaattcggtaatagtaaaagtcaccgtaacattagccattatgctttcccccaatctttacgtggatcaaaagagctctgggcgtctgccagttgctgccacagcgcggcagtgttttcatccggtttcggcggcatcacgattttcagtaccgcatacagatcgccggtctgttttttgctcaccagacctttgcctttaacgcgcaatcgttgcccggcctggctgcctggcgggatagtcagcaaaatgctttctttcagtgttggaacggtgactttagcacccagcgccgcttcccacgggctaaccggcaccacaatttccagatcctggccgacaatatcaaacagcggatgtggcgcaatatgaatcaccagccacaaatcgccatttggaccgccgttttcgcccggcgtcccctggcctttcagacggatgcgttgaccattgccgacgcccgccgggatcttcacattcagcgttttcggaatttcctgttcgatcatgccaaaggcgttataaaccggcaggttatagctgatggtacgcttatgctcagtaagcgtttcttcgaggaataccgccacttcgatttcaatatcgtggccgcgtgtggcggggcgttgacggctctggcgggcatgctgaccgaaaatactgctgaagatatcgtcaaaatcttcggcgttaaaactctgaccgtcgccatggtggaactgacggttaaattgcggatcgttgcgatgttgccacatctgatcatactcagcgcgacgttgttcatcacttaacacttcccaggcttcagcgacctctttgaagcgggcttcggcatccggttctttgctgacatcaggatggtatttgcgggcaagtcgacgataggcggtcttgattgtcttgagatcgtccgtcggtttcacgcccatgatggcgtaataatcctttaattccatagcgttatctcgcgtaaatcaacacaaattgaaggaacccctgtaaggtaactcctataagtgtagggtaatcctcaaaatttcatatgccaacacagaatatgttattgaaatcatcgcggagaggaggtcgccatcaagatgggttgctgaacatattttaaacaggtgaaaaagggtgagcgatttttgatagttgaaccaggcactttaagtttaactagggcgtcattatttattaaattttatagacgctatatatgggtagtaatatacatggaattagttgcactgcaaataattatttgaaacaggcctggaacgatataaaaaatgagtacgaaaaaaatcaaacatatagtatcacgctttttgaaaacacactggtgtgttttatgcggttatacaatgaactcagacgtaaagtaaatgaagaggatactccatgtctggaatgtgaaagtctagaaaaagaatttgaggaaatgcagaatgataatgatctaagtttatttatgagaatattgcgtactaatgatacacaaatttatagtggggttagtggaggtattacatatactatacaatatgttcgagatattgatattgttagagtgtccttgccgggcagagctagtgagtctatcacagattttaaaggttattattggtataactttatggagtatattgaaaacattaatgcgtgtgatgatgttttttctgagtattgttttgatgatgaaaatataagtgtccagccagagcggataaatacgccgggaatatctgatttggattctgacattgatttgtctggtatatcttttattcagcgtgaaactaaccaggcattaggattaaaatatgctcctgtagatggcgatggatattgtctgttaagagctatactggttttaaaacaacatgattatagttgggcgctggtcagttataagatgcaaaaggaagtttacaacgaattcattaaaatggttgataaaaaaacgatcgaggctcttgttgatacggcattctataatctcagggaagatgtaaagacgttatttggcgttgatctacaatctgacaaccaaattcaggggcagagtagtcttatgagttggagctttctgttttttaaaaaacaattcattgatagttgcttgaataacgaaaaatgtatcctgcatttacccgagtttatatttaatgataacaagaacttgcttgctttagataccgacacgagcgataggattaaagcggtgaagaattttcttgttgttcttagtgatagcatttgcagtttatttattgttaatagtaatgtggcaagtatctccttggggaatgaatcctttagtacagatgaagatcttgagtatggttatttaatgaacactggcaatcattatgacgtttacctccctcctgaactttttgctcaggcttacaagttaaacaataaggaaatgaatgcgcaactcgactatttaaatcgttatgcaatttaatggcaaaggcatatgctaaaaaccattgttattagtctcacacttttttattggtaaatattgtctctgtattggtaacgccgcagatattctgtttagccacaggtgcaattatcagcggcgtacgcgaggcaggggctaatcaggcatagtttgcgtcaaaccttgcctgtttttgaagatgtatatagaaaaacaggcgttcaacaagccattttgcgaacctgttcccggaaaaaagtcatatttctgtcacactctttagtgattgataacaaaagaggtgccaggaatgaacaaaacgctaatcgccgcagctgtggcagggatagttttactcgctagtaacgctcaggcacaaaccgtaccggaaggctatcagctacagcaagtgctcatgatgagccgccataacttacgtgcgccgctggcgaacaatggcagtgtgctggagcagagtacgccgaataaatggccagaatgggacgtccccggtgggcaactcaccaccaaaggtggcgtgctcgaagtgtatatgggccattacatgcgtgaatggctggcagagcaggggatggtgaaaagcggggaatgcccgccgccgtacaccgtttatgcctatgccaatagtctgcaacgtaccgttgcgaccgcacagttctttattaccggcgcattcccggggtgtgatattcctgtgcatcaccaggaaaaaatgggcactatggacccaacctttaacccggtgatcaccgatgattccgccgcattcagtgaacaggcggtggcggcaatggagaaagagctcagcaaactccagcttaccgacagctaccagctactggaaaaaatcgttaactataaagattcccctgcctgtaaagagaaacaacagtgtagcctggtggatggcaaaaatacctttagcgccaagtatcaacaagaaccaggtgtttccgggccgctgaaagtcggcaacagcctggtagatgcgtttactttgcaatattacgaaggttttccgatggatcaggtggcctggggagaaatcaaatctgaccagcagtggaaggtgttgagcaagcttaaaaacggctaccaggacagcctgtttaccagtccggaagtggcgcgcaatgttgcgaaaccgctggtcagttatatcgacaaagctctggtcaccgatcgcaccagcgcaccgaaaattacagtgttggttgggcacgactccaacattgcctctctgttaacggcgctggatttcaaaccgtatcagttgcatgaccagaacgaacgcacgccgattggcggcaaaatcgttttccagcgttggcatgacagcaaagccaatcgcgatttgatgaaaattgaatatgtgtatcagagtgcggaacagttacgtaatgccgatgcgttaaccctgcaggcacctgcgcagcgtgtgacgctggaattaagcggttgcccgatagacgctgatggtttctgcccgatggataagtttgatagcgtgttgaatgaagcggtgaaataacagaaaactcccccgcgagaagcgggggagtcgctggttaaacgtttttacgttcgatggtctgttcgccccaaaaaaggctatctttatcggtcttagcaaaggctttgactaacacttcatcactaccttcttcccaaatcttttccgccattttttcgtcgtacccggcgacttcgaaaatggcctcggctatttccgggctcgtattgcgcagagatgcccattcaccgacgtgatgagctttcgcttcttgagttggcatgcgtatcctcctgttgaagattagccgttaagtttaactgccagacctgcgacatattccccttgataacgagcaatagacagttcttcctggctgggctggcgactaccgtcaccgcctgcgatggtggttgcgccgtacggcgtaccgccgcgaacctgactaacgtcaaataattcctgcgctgcgtagccaatagggacaattaccatgccgtgatgcgcaagggtcgtccaggtggatgtgatggtttgttcctgaccgccgccagtaccggtggaactaaagacgctcgccagttttccgtatagtgcgccggaagcccacaggccgcccgtctggtcgaggaaggtacgcatttgaccggacatgttgccaaagcgggtaggtgtaccaaaaataatggcgtcgtaatcggccagttcttgcggggttgcaaccggtgcagtttgcgttttaccgcctgctttttcaaataattgcggcggcatggtttccggtacacgcttaacgacaacttcagcgccatccactttgcttgcaccctcagcgactgcgcgtgccatcgtttcaatatgtccgtacatggaataataaagcaccagaactttagccatttctaaccactcctcgtgttatctctattccgtagcgattcgctaccacttatttaaagataagacgtccttttcagagtgcaaatttcacaaccacttatttgatttataacaactttcacaagcacgtaattttgtcgcaaaatgacacatttttatctcatcgcgtttttttaatcataagagcggcttatggataattattggagatgatatctattctcgctaagaagctgttgcaggatattaccaaacgcgggtctgcccgcgtcagttcactaagcttagtcccacgtagcgaaaatatggcagccgccatacgccgcgttaattctatgcaatatgatgtctatacccagacggaggtcagtaatggcaaaccatcgaggcggttccggcaattttgcagaagaccgcgaaagagcaagtgaagcaggtaaaaaaggtggacagcacagcgggggtaatttcaagaatgacccgcagcgcgcatctgaagcaggtaaaaaaggtggtaagagcagtcacggcaaaagcgacaactaaccgggctaatcaatgacgaatgcatttttgtctgtagctcgtcaaaaagccatcaccgccggttacccggtggttgatactgatgacaaatgtaagcttgcctgatgcgcgatgcttatcaggcctaccagaagattgcaatatattgaatttgcactgttttgtaggccggataaggcgtttacgccgcatccggcatgaacaatgcgtacgttgtcaacaatctgcaccgccggtaaccccggcggttttctgtttatggctcctgatgaacaacttctggcggtggaacgtcaaccaactttctgcttaacaacgcattgagtaaaatcgcgccaaaggttgctgtaccaatccctcccaacgtaaaaccgcccagcgtgagagcaaaatcacccgcgcccagcactaaggttactgcgaccataatcaaattaccgttctggcttaaatcgacacggttttgtacccatatccttgcgcctgcgacggcaatcagcccgaacacaacaatacttgcaccaccaataaccgcggccggaatggtatgaatcagcgcaccaaatttcggactaaagcccaacagcatggcgatgacggcagcagcaacaaacaccagcgtgctgtagactttggtcacggccatcacaccgatattttcagcataggtggtcacgccgctaccgccgacagagccggaaagcatcgttgccagaccatcgcctacgaatgcccgccccatatacgggtccatattgcgtccggtcatcccggcgactgccttgagatgacctaagttttccgccaccagaatcaccgccacgggcgcaatcagcatcattgcctgaccattaaaagcaggagtggaaaaatgtggcagaccgaaccaggcagcatggctgacgagagtaaaatcgacggcttttcccagccctaaaacgttggtcatcacgccatacagcagacaggcgacaattaatcctacgagaatcaataaccgctggatcatgccacgggtaaacaccgccaccagcccaatacacagcaccgtcattaccgccatccagctatcaaaggcgctagcgcttacacttttcactgcgataggcgctaagttcaggccaatcgccatcaccaccgcacccgtcaccaccggcggcatcagtcgttcaatccagcgcgtaccgattttcatcaccaccaggccaatgacggtataaaccagcccacaggcgataatcccgcccagcgcaatgctgatattcgggttaatgccctgaccgttaaagcccgtcgcggcgatcaccacgccgacaaaagccgcgctggagccgagataactggggacgcgcccgccggtaataaagaaaaacagtaacgtgccgatcccgctcattaaaatggaaagattgggatccagccccatcagaatcggcattaacaccgtcgcgccaaacatcgccaccgcgtgttgaacgcccattactgccgtctgagcaaacggcaatcgttcatccggcgcgaccacgccgctctctgtagaggtgctttttaactgccagtgaggaaaaccgaacattgccatcagctgtctccttaaggaggttaacaagcagggcgcatcagcgcgtgataactgcgatcgaaccacaccagcccgtagggtgtggtgtgacgatgaatcgcttcgatggcgcaaaacagaatgtcgtgggtgccgacgctcaccacctggctgatacggcagtcaaagctaaccagagcctcttccagttgcgggcatccggtcacccccgtctgccagcgggcggcggcaaagcggtgttccatgggcgttttgccgccaaaaaggttactaagcggctcctgcccggcgctaagtgtatttacacacagcgttcgattttcattgaatgccggccagacggacgccccacgattcaggcacaccagtaatgtgggcggcgtatcggtcacactgcagacggcgctggcggtgaacccggcgcgcccggctggaccgtccgtggtgataatattgaccgccgcgcccatgcaggacatcgcatcgcgaaaagtttgttgatcgacaatgttcatagtttgctccttacaacagcccgcaggcttcttcaaaggacagacgtggcaggcgcgcataaagcttgctgctatcgccatagccgatattaatcagcagattgctcttcagcgtgctgcccgtaaaaaaggcgtcgtccacgtgttgacggtcaaagccgctcatcgggccggtatccagtcccagcgcccggcaggcgacgatcagataggccgcctgcatggaactgttgcgaaacgctgtttcttcggcaagttgtgggctggaggtaaaccaactgcgggcatcaccgtggggaaacagtagtggtaaccgttcataaaattcactgtcccaggcgacgatagcggtgacgggcgcggtcagggttttttgcagattgccgctggaaagtgccgggcgcagacgttcttttccttctgccgtgcgggtaaacacgatccgtgccggagaacagttagcacttgtcggcccccatttcatcagggcataaatctcccgtaacgtctcatcgctgacgggtgtctcccgccagccgttgtgagtgcgggcatcggtgaacagggtgctaagcgcacctgggctaacggcttcgttcatagcaattccttacagggcggcttcacggtgatgtaacaggctggcaagcccgttgagtaacagagcattaaacgtttcgggatcggtcacgttgcaggcgtgtccgccatagggcatcaccattttctggctatcgggcagggcggcatgaagttcactggaacatgctgttggcaccagcagatcatcactggcgcagatgatttgcaccgggcagcggatgcgatccgcatggtgactaaagtcagcgcgtttgagggcgttaagtcgacgcagtaaattatttttgccctgaaaatgcgccagtgccagcgcgtcttctgcctccaggcgaggtgcgcgggccgccatccagtcggcgggatagaggaacaacggctgcgcttccacccatgcctgcgcgccgccgctatacagtaatcgttcgcgaacctgaaaacagcggcgcgtatgggcgtttattcgtagccagccgttaacgctgatcagcacagttacgctcgcgggataatccagcgccagctgcattcccaccagcgcaccgagcgcatggccgaccactgcgtaatgctcaatccctgcggctaccagcgcctgatgcagttccgctgccatctgggcgatactgtaatcttctgccagcgtgtcgggattattgccggtgccgcgctggtcgtaacagactacctgatactcctgctccagcaccgccagttgcggtaaccagtaactgccgctacccccaagaccgctaatcaacaccactacgggcgcatcagcataagggggaggactgagactaagtttcatcgcggcctcacttggcgatatgcgcaattgtggcgatttccaccagcgcgtcaggttttaccagtccgcactgaatgcagaatcgcgccggtttatcacccggaaaaaactcggcgtagatttcgttaatcgcggcgtaatttttccagtcggtaataaagatgctgttgaaggtcacatccgccatcgtgccacccgccgtctcgatcaccttgcggatagtttccagaacgtggcgggtttgcgcctttgggtcatcggcaaacagcacgttattatgttgatcaaaagccagcgtaccggagacatacaccacgccatcagccagcgtgccgggaacgaagggggccagcggtgcgctgctgccagcgggaataattacggattttggcatcgttaaactccttaagcgatatgagcaaaggacgtgggagaaagcgcgtcgcagaatgtttcgacgtcgctgacccagccaaaaaaggtttcgatattgaacaacgcggctttctgcgcaaatttcggccccgcctggtgagttgcgtcttcaagcaccacgccgaaatactccagaaaaaagccgtcgcgtagcgtgctttcgacgcagacgttggtagcgatgccggtgaaaaccagatggcgtattccgcggctgcgcaaaatgctgtccagcggcgtattgaagaaaccgctgtagcgcggcttcggcagcacaatatcgccaggctgcggcaccagttcatccaccagttgataatcccaggagcctttcgccagcaatttcccctgcagctgcggctgcttacgcatggttttcagggcgttgcttttatgaaaattcggactgccgggtccgccagcctcgacatactgttcatcccagccattttgaaaccagatgatcagcatccctgccgctcgcgctgcggtcacggcggtttgaatgttggcaatgaccgggcgagtggtactgacatcaaacccggcgagatctaagtagccgcctggcgtggcataagcgttttgcatatccaccacgatcagcgcactttgctgcggatcgaaggtaatggcttccggtcgagcggttaaggtcgtcatcatgccacctcctgagtcagcgcaggtagatgggcgcggcattgcatcagtggttgaatgcgctcgccgaaggtttcgattccgctcagaaaatcgtcgaaggttaacagcacgccttcggcaccaggcacgcttgcgacttcatctaacatgcgcgcgacactggcgtaagaaccgactaacgtccccatattgatgtttaccgcgctagtgggatcggccatctgacgaacgttggtgtcagtaccggagcgggtatctttctgactttgttcggttagccagcttaacgcctcttcatccgcgcccgctttgtagtgttcccatttggcgcgagcggcatcgtcggtttcatcggcaatcaccataaacaacacataagagccaacgtcgcgtccggtttgctctgcggcctgtttcatccgcgcagcggtcggggcgaaagccgtgggtgtatttacgcctttgccgaaacagaagttgaaatcggcataccgggcggagaacgccatgccagcgtcgctttgcccggcgcagatcactttcatggggacactcggttgcggactcacgcgacaatcattcatggtgaaaaaatcgcctttaaaatcgcttttccccgtgccccacaggtcgcgcagcacctgaacatattcggtgagatagtcgtaacgacgggagaaatagtcatcgccaggccagatacccatctgctcatactcgggcttttgccagccagtcacgaggttgacgccaaaacgcccgccagagatggagtcgatggttgcggccatacgggcgacgattgccggaggtaacgttaaggtggcagcagtggcgtaaatctgaatgcggctggtcacggccgccagccccgccatcaaggtgaagctctcaaggttgtgatcccagaactcagttttgccgccaaagccacgcagtttgatcatgctcagggcgaaatcgaaatggtagtgctccgctttttgcacaatggctttattcagttcaaaggtcggcatgtactgcggcgcgtgggtgctaatgagccagccgttgttgccaataggtacgaatacgccaattttcatcatcaacctctcttcgtctcgtaaagtgaaagtcagacggggcgctgcatcctgcatatccttttcagccgcgtattggcttgtttgcaaagcggatgccagtttttaaaaagttaatgttattaatctgttaacattacgttatctaaaatatctggtaaaaagtggactaaacggtcaaaacagttgcacataaaacatgcatctgtgcgcgatgagagtgcagaaggtcgaggccgggcgggggttttgctatcctgttgccaatctacaagaggggagagcgcatgacgcaaggcgcagtgaaaacaacgggtaaacgtagccgcgcagtaagcgcgaagaaaaaagcgattcttagcgcagcactggacacttttagtcaattcggttttcacggcacaaggctggagcagatcgcagagttggcgggtgttagtaaaaccaatctgctgtattactttccgagtaaagaggcgctgtatattgccgtgctgcggcagattctcgatatctggctggcaccgttaaaagcgtttcgtgaagatttcgccccgctggcggcgatcaaagagtacatccgtctgaagctggaagtcagtcgcgattatccgcaggctagtcgcctgttctgtatggagatgctggcaggcgcgccgctgttaatggatgaactgacgggcgatttgaaggcattaattgatgagaaaagcgcgctgattgccggttgggtcaaaagcggcaaactcgcgccgattgatccgcagcatttgatttttatgatttgggcttccactcaacattacgccgatttcgcccctcaggtggaggcggtgacaggcgcgacgttgcgcgatgaggtatttttcaatcaaacggttgaaaacgtgcagcggattattattgaggggattcgaccacgttaaagatgccggaggaggttgtaacatcctccggctacctgtttaacctatagtcattaagctggcgttaccgccagcggcagcggtattcacactcaggctacgctcgatatacagccgttccagaaggatattgctttcgccacgggcaaaaccctgcacgctaacaattgtgccatcccgcgcggcaactgcttcacacaatgcgcgaagctgatcgctatcaccgtggaagatcaccgcatcaaacggttgagcggttatattttccgctttcgccagttgaatacgttcgctgactgcgcttggcaatgccttcactaactgacgatgcagcgcgtcatccggccacagtacctggctgcccaccgccagcacggcggcgagctgagtcagcgcatcctgctcatcatcggcaatacacaacacgcgctcacgcggcagcagcgtccaggtgttgcgttcacccgtcggccccggcagcaatcgttgtgttcctgcctgcgccagctcgccatattgcgtacataacgcctgcaattctggacgatttgctgcccattcccgcagtgcatttagcggctgagtcaatgcggctttcaactgcgcatcgaccggatactttgcatcctgacgcgcgagcgtcactgccagcgcactttccgggcgattcgccagcagacggtagagatagagcggaccgcctgctttcggcccggtaccggacaacccttcgccgccgaacggctgcacaccaaccactgcgcccaccatattacggttaacatacaggttaccaacatgggcgctgccagtgacctgggcgatggtttcatcaatgcgcgtatggacgccaagcgtcagaccataaccggaagcgttaatctgctcgatcagctctggtagctggttacggttgtaacgcaccacatgcagcaccggaccaaagacctctttttgcaattcggcaaagtcatccagttcgatcagcgtcggggcgacaaaggtgccgctttgccattcacgggcatcttcgctgttttcccgcaccgcctggaacaccggacggcctttgctacgcatggtctgaatatggcgctcaatattggctttcgcttcgctatcaatcactggaccgatatcggtggtcaggcgacccggattacccatccggcattcggccattgcgccgcgcagcattttcaacgtgtggtcggcaatctcatcttgcaggcacagcacgcgcagcgcgctacaacgctgacccgcactgtcgaacgcgctggccagtacatccacgacgacctgttcggtcagtgcactagaatcgacaatcatcgcgttcatgccgccggtttcagcgatgagcggaatagggcgaccctgagcgtccaggcggctggcgatattgcgctgcagtaacgtagcgacttcggtactaccggtaaacatcaccccgcgcacgcgatcatcacccgtcagttgcgcgcccacggtttcaccccgacctggcagcaattgcaccacgcctggcggtacacccgcttccagcaaaatggcgatcccttgcgcggcaatcagcggcgtttgttctgccggttttgccagcacgctgttacctgccgccagtgcggcggcgatctgcccggtgaaaatagccagcgggaagttccacggactgatacacaccacaggccctaatggacggtgggtttcgttagcgaaatcatcccgcacctgtccggcgtagtagtggagaaaatcgaccgcttcgcgcacttcggcaatggcgttactgaaggtttttccggcctcacgcaccagaataccaatcagttgctgcatctggctttccatcagcacggcagcgcggtgcaaaatcgctgcgcgttcagccggaggcgtggcaaaccagattggcgcgttattaaccgcactttccagcgcctgttctacttcacgcggcgtggcttcacgcacatagcccacaatatctttcggttccgcagggttaataacggggctcatctcacctgccgctaccggttgttccagcattggcaaggcctgccatttttgcagtgcactattgagcagggcagaggagaggctggccaggcggtgttcgttagcgagatccagccctgcgctgttgtcgcgcccgtgaccgtaaagatcgcgcggcaggggaattttcggatgcggtaatccagtttgcccttcctgttgcgccagtttttctacagcagtgaccggatcggcgaccagttcatccagtggcaaagaggtgtcggcaatacggttaacaaagctggtgttagcaccgttttccagcaggcgacgcaccagatacgccaacagcgtttcatgtgtgccaaccggagcataaatacgacacggacggttaagtttgccgtcggcaactttcccggggacctgctcatacagtggctcgcccataccatgcaggcactggaactcgtactgacccgggtagtagttctgccccgccagttgataaatcgccgccagcgtatgggcgttgtgcgtcgcgaactgcgggtagattagattcggcaccgccagcagctttttcgcacaggcgagataagaaacgtcggtatacaccttgcgggtataaaccggataaccttcaaggccgtccatctgcgcacgcttaatttcactatcccagtacgcgcctttcaccaggcgaatcatcagacggcgacggctgcgggtggcgagatcaatcaggtaatcgatcaccaacgggcagcgtttttgataagcctgaataacaaaaccgatgccgttccagcctgccagttccggctcgaaacagagtttttccagcagatcgagggagatctccaggcgatcggactcttcggcgtcaatgttgataccaatatcgtactgacgcgccagcagggtgagacttttcagacgcgggtaaagctcttccattacccggtcatactgggcgcggctataacgcggatgcagcgcgctcagtttgatactaatgcccggcccttcatagatgccacgaccgttagacgctttaccgatggcgtgaatcgcctgctgataggaaaccatatacgcctgtgcatctgcggcggtcagcgcggcttcgcccagcatatcgtaagagtaacggaaacctttctcttccagcttgcgggcattggctaacgcttccgcgatggtttcgccagtgacgaactgctcacccatcaggcgcatcgccatatccacacctttgcggatcagcggttcaccgcttttaccgataatgcggttcaggctgcgggagaggctggcttcgttatgggtggaaaccagtttgccagtaaacagcagcccccaggtggcggcattaacaaacagactcgggctacgaccaatgtgactctgccagttaccgttgctgattttgtcgcgaattaacgcgtcgcgggtggctttgtcgggaatacgcaacaacgcttccgccagacacatcagcgccacgccttcctggctactcaggctaaactcctgcaataacccctggaccatacctgcgcgaccactggcatttttttgattacgcagtttatcggccagctgatacgccagtttgtgcgcctgttcagcaactggctgcggcaggcgggcttgttccagcagcatagaaaccgcttcggtttccgggcggcgataggccgcggtgatcgcggcgcgggaaacgctctggggcaatatttgctcggcaaagtcgaggaatggctggtgtggttcctctgccggagtcggtgcttcatcgctctcattggccgcgccagaaagcagcgcaggtagctccggcagagtatcgctgttttccagttgttcgagataagaaaaaatcgcctgcttaattaaccagtgtggtgtgcgatcgatacgtgtcgcggcagacttaatacgctcacgcgtcgcgtcgtccagcttaacccccatggtggtggttcccatgccattactcctgttgttcagaaaggtgcaacttaacgttatcgtgaaatatccatgatgttgcaactttgtgcaaccatgttaaatgtgacatgcgtagcaagcttaaaaatgaatgaaatgttaataaaagaaatcgatatgacagggattaaaaaaataactcagactttttctctgcggcagttaacatttttgaaaggtgcaaccgcaaaaaatgtgagagagtgcaacctgatgaaaaatagtgtcgctgagcactaaaatttaatgtaaatggtgtgttaaatcgattgtgaataaccagcgcttccggcaggatacggtcgccctggtaaaacataaactctgttaccccgttccggtggcagatataacggcaagtttcgacattgccgataataattttttggagactttagatggctattagcacaccgatgttggtgacattttgtgtctatatctttggcatgatattgattgggtttatcgcctggcgaagtacgaaaaactttgacgactatattctgggcggtcgtagtcttgggccattcgtgacggcattaagcgcgggtgcgagcgatatgagcggctggctgttaatggggttgccgggcgctgtttttctttccgggatttccgaaagctggatcgccattggcctgacattaggcgcgtggattaactggaagctggtggccgggcggttgcgtgtgcataccgaatacaacaataacgccttaacactgccggattatttcaccgggcgctttgaagataaaagccgcattttgcgcattatctctgcgctggttattttgctgttcttcaccatttattgcgctagcggcattgtggcaggcgcgcgtctgtttgaaagtacctttggcatgagctacgaaacggctctgtgggcgggcgctgcggcgacgatcctttacacctttattggcggtttcctcgcggtgagctggactgacactgtacaggccagcctgatgatttttgccctgatcctgacgccggttatcgtcattatcagtgtcggtggctttggtgacagcctggaagtgatcaaacaaaagagcatcgaaaacgttgatatgctcaaaggtctgaactttgttgccattatcagtctgatgggttgggggctgggttacttcgggcagccgcacattctggcgcgttttatggcggcggattctcaccacagcattgtccatgcgcgtcgtattagtatgacctggatgatcctctgcctggcaggggcggtggctgtcggcttctttgggattgcttactttaacgatcatccggcgttggctggtgcggtaaatcagaacgccgagcgtgtgtttatcgaactggcgcaaattctgtttaacccgtggattgccgggattctgctgagcgcaattctggcggcggtaatgagtaccttaagttgccagctgctggtgtgctccagtgcgattaccgaagatttgtacaaagcgtttctgcgtaaacatgccagccagaaagagctggtgtgggtagggcgtgtgatggtgctggtggtggcgctggtggcgattgcgctggcggcaaacccggaaaaccgcgtgctgggcttagtgagctacgcgtgggcaggctttggcgcggcgtttggtccagtggtgctgttcagcgtgatgtggagtcgcatgacgcgtaacggtgcgctggcggggatgatcatcggtgcgctgacggttatcgtctggaaacagttcggctggctgggactgtacgaaattattccgggctttatcttcggcagtattgggattgtagtgtttagtttgctgggtaaagcgccgagtgcggcgatgcaaaaacgctttgccgaggccgatgcgcactatcatagcgctccgccgagtcggttgcaggaaagctaagggacttagcctgcggcggttttgtttggcttcagcagcgggttgcgctcccttaatgtgcctcgccatataaattgaatggtgcagggagcgcgcagggggcggccaatcgccgccgccccctgctgtcccggccttcggggaacgcttcagcgattttgacgccaccaacacccgagctgttattatgttccgggcaaaaagttagatttgataatcgcggatggacgaaattgcttgatacacccgcttatcagttttacatggaagctctgatgcattgagtctggacagttttgtcggctggatacggcgtttacgcggcatccggcaagaacacatggttctttgcaaacaatcccatctttctaccctggaataatcgtttatatcccttggcattacctctctttgtttacattccaacatcattttataaacattccgcttgtgtttttctttgccgtaatgataatcgctatcactgcgatttacttttctttgcatagattgactcagaaaaacgtttaagggtgggtggcatgtttgttccgtttctcattatgttgcgcgaaggacttgaagccgcgctgattgtcagtttgattgccagctatcttaagcgtacccagcgaggccgatggattgtgtgatgtggattggcgtgttgcttgccgctgcgttgtgcctgggcttgggtatcttcattaacgaaaccaccggcgaatttccgcaaaaagaacaggaactgtttgaaggtatcgtggcggtgatcgccgtggtgatccttacctggatggttttctggatgcgcaaagtgtcgcgcaacgtcaaagtgcaactggaacaggcagtcgatagcgcattgcagcgtggaaatcatcatggctgggcgctggtgatgatggtcttttttgccgttgcaagggaagggctggagtcggtctttttcctgctggcggcatttcaacaagatgtcgggatctggccgccgctgggtgcaatgctcggtcttgctactgccgtggtgctaggcttcctgctctactggggcggtattcgcctcaatcttggtgcattttttaaatggaccagcctgtttattctcttcgtcgccgcagggctggcagctggtgccattcgcgcatttcatgaagccggattgtggaaccactttcaggaaatcgccttcgatatgagtgcggtgctctcaactcactcgctgtttggcacgctgatggaagggatttttggctatcaggaagcgccgagcgtcagcgaagtcgccgtctggtttatttatctcatcccggcgctggtggcatttgctctgccaccacgcgcaggggcgacagcgtctcgctccgcgtaacaaatacgacgcaaactcttgcttagttacaacatactttaaagggatagtctcgtcatgaccattaacttccgccgtaacgcattgcagttgagcgtggctgcgctgttttcttctgcttttatggctaacgccgctgatgtgccgcaggtcaaagtgaccgtgacggataagcagtgcgaaccgatgaccattacggttaacgccgggaaaacacagttcattattcagaaccacagccagaaggcgctggagtgggagatcctcaaaggcgtgatggtggtggaagagcgggaaaatatcgcccctggctttagccagaaaatgacggcgaatttacagcctggcgaatacgatatgacctgcggtctgctgactaacccgaaagggaagttgatcgtcaaaggtgaggcaacggcggatgcggcgcaaagtgatgcgctgttaagtcttggtggtgcaattactgcatataaagcgtatgtcatggcggaaaccacgcagctggtgaccgacaccaaagcctttaccgacgcgattaaagcaggcgatatcgaaaaagcgaaagcactgtatgcaccgacgcgccagcactatgagcgtattgaaccgattgctgaactgttctccgatctggatggcagcattgacgcccgtgaagatgattacgagcaaaaagccgccgacccaaaattcactggtttccaccgtctggaaaaagcattgtttggcgacaacaccaccaaagggatggaacagtacgctgagcagctttataccgatgtggtcgatttgcaaaaacgcatcagtgaactggctttcccacctagtaaagtggtcggcggcgcagccggactgattgaggaagtggcagccagcaaaattagcggtgaagaagatcgctacagccacaccgatctgtgggatttccaggctaacgttgaaggcagccagaaaattgtcgatttgctgcgtccacaactgcaaaaagccaacccggaactgctggcaaaagtcgatgccaactttaaaaaggtcgataccattctggcgaaataccgtactaaagacggttttgaaacctacgacaaattgaccgatgccgaccggaatgcactgaaaggaccgattactgcgctggcggaagatctggcgcaacttcgcggtgtgctgggactggattaagcgttatgcagtataaagatgaaaacggcgtgaatgaaccgagtcgccgacgtttactgaaagtgataggtgcactggcgctggcgggaagttgtccggtcgctcatgcacaaaaaacgcaaagtgcgccgggtacgcttagtccggatgctcgcaatgagaaacagccgttttatggtgagcatcaggcagggatcctgacgccacaacaggccgcaatgatgctggtggcgtttgatgtgcttgccagcgataaagccgatcttgagcggttgtttcgcttgttgactcagcgttttgcttttctgactcagggcggagcagcaccagaaacgccaaatccgcgcctgccaccactcgattccggcattcttggcggctacattgcgcccgataatctcaccatcacgttaagcgtgggtcacagtttgtttgatgagcgctttggccttgcgccacagatgccaaaaaagctgcagaagatgacgcgtttccccaacgacagcctggatgcggcgttatgtcatggtgatgtgttgctacagatttgcgccaacacccaggacacggttatccatgcgctgcgcgatatcatcaaacacacgccggatttgctcagtgtgcgctggaagcgggaagggtttatttccgatcacgcggcgcgtagtaaaggcaaagagacgccgattaatttgctgggtttcaaagacggcactgccaatcccgatagccagaatgataagttgatgcaaaaagtggtgtgggtaacggcagatcagcaggagcctgcgtggacaatcggtggcagctatcaggcagtacgcttgattcagtttcgagtggaattttgggacagaacgccgctgaaagaacagcagacgatttttggccgtgataagcaaaccggtgcgccgctgggaatgcagcatgagcatgatgtgcctgattacgccagcgacccggaagggaaggtgatcgcgctggacagccatatccggctggcgaatccccgcacggcggagagtgagtccagcctgatgctgcgtcgtggctacagttatagtctgggcgtcaccaactccgggcaactggatatggggttgctgtttgtctgctaccaacacgatctggaaaaaggcttcctgacagtacaaaaaaggctcaatggcgaagcgctggaggaatacgttaaacctatcggcggcggttatttttttgcgctgccgggggtgaaggacgcgaacgattatttcggaagcgcgttattgcgggtttaatgtttttaggcggataaggcatttgtgcgcagatgcctgatgcgacgcttgcgcgtcttatcatgcctacaatcagtgcgggtttggtaggctggataaggcgttcacgccgcatccggcgatcgtgcactgatgcctgatgcaaatcctgctgaaagcacacagcttttttcatcactgtcatcactctgtcatctttccagtagaaactaatgtcactgaaatggtgttttatagttaaatataagtaaatatattgttgcaataaatgcgagatctgttgtacttattaagtagcagcggaagttcccggcagtgatagtcagtcactatggagatcgcggatggtaacgtcctgtactggacatgttttagataatcaacgcgccaccactcgcggagttttctcctccggtagtcatctcgtcactttgcattttcaacctcatcctttctttagttgtgttaccgacgccgtaaacggtgcgcgtagccgttttagcgcattttatccaaaagcaaactatggcttacaaggaagccaaccctctgatgttcgtgcgcataatcgcgctgccaacggcgcgtgtgatgaatacaaacaactcaaggtgctctccatgggaagacaaaagcagtgatcaaagctcgtcgcgaggcaaaacgtgtgctgagacgggatagccgcagccataagcagcgtgaagaagaaagcgtcaccagccttgtgcagatgggcggcgtagaagccattggtatggcccgcgacagtcgcgatactagccccatcctcgcgcgaaatgaagcgcaattgcactatctgaaggctattgagagtaagcagctgatattcgccacgggcgaagccgggtgcggaaaaacctggatcagcgcagcaaaagcggcagaggccctgatacataaggatgtcgacaggattatcgtcacccgtccagttctgcaagccgatgaagatcttggcttcttacctggagatatcgcagaaaagtttgctccctattttcgcccggtctacgacgtgctggtccggcgcttaggggcttcctttatgcagtactgcctgcgaccggaaatagggaaggtggaaattgcgccgttcgcctatatgcgtggacgtacctttgaaaatgcagtcgtcattcttgacgaggcgcagaatgtgactgccgcgcaaatgaaaatgtttttaacccgcctcggggagaacgtgacggttatcgtcaacggtgatatcacgcaatgcgatttgcctcgcggcgtgtgctccggattaagtgacgcgctggaacgtttcgaagaagatgaaatggttgggatcgtccggttcggtaaagaggactgcgtacgtagcgcactttgccaacgtacgctgcatgcctacagttaagtgtgttatcggtgcagagcccgggcgaaccgggctttgttttgggtgttcccggtgtgtgcaatatacgaaaaaaaagcccgtactttcgtacgagctcttctttaaatatggcggtgagggggggattgactcgcttcgctcgccctgcgggcagcccgctcactgcgttcacggtctgtccaactggctgtcgccagttgtcgaaccccggtcggggcttctcatccccccggtgtgtgcaatatacgaaaaaaaagcccgtactttcgtacgagctcttctttaaatatggcggtgagggggggattcgaacccccgatacgttgccgtatacacactttccaggcgtgctccttcagccactcggacacctcaccaaattgtcgttcctgtcttgctggaacgggcgctaatttagggaaatcatgacctgaggtcaacaaactttttgaaaaaatcgcgcgtttattcaaacttcaatcaatgtgtggttttaataagcgaaatctgctttttttgccaccgaccacggatttgttatgctggtggcctttgtagatcataacgataagtgcgaataaatttcgcacaacgcttttcgggagtcagtatggatatcatcttttatcacccaacgttcgatacccaatggtggattgaggcactgcgcaaagctattcctcaggcaagagtcagagcatggaaaagcggagataatgactctgctgattatgctttagtctggcatcctcctgttgaaatgctggcagggcgcgatcttaaagcggtgttcgcactcggggccggtgttgattctattttgagcaagctacaggcacaccctgaaatgctgaacccttctgttccactttttcgcctggaagataccggtatgggcgagcaaatgcaggaatatgctgtcagtcaggtgctgcattggtttcgacgttttgacgattatcgcatccagcaaaatagtagccattggcaaccgctgcctgaatatcatcgggaagattttaccatcggcattttgggcgcaggcgtactgggcagtaaagttgctcagagtctgcaaacctggcgctttccgctgcgttgctggagtcgaacccgtaaaagctggcctggcgtgcaaagctttgccggacgggaagaactgtctgcatttctgagccaatgtcgggtattgattaatttgttaccgaatacccctgaaaccgtcggcattattaatcaacaattactcgaaaaattaccggatggcgcgtatctcctcaacctggcgcgtggtgttcatgttgtggaagatgacctgctcgcggcgctggatagcggcaaagttaaaggcgcaatgttggatgtttttaatcgtgaacccttaccgcctgaaagtccgctctggcaacatccacgcgtgacgataacaccacatgtcgccgcgattacccgtcccgctgaagctgtggagtacatttctcgcaccattgcccagctcgaaaaaggggagagggtctgcgggcaagtcgaccgcgcacgcggctactaataaagcatcaggattcctgctatccttggcgggaattgaatacaggagagagttatgtatcccgtcgaccttcatatgcataccgttgccagcacacatgcatatagcacattaagtgattacattgcccaggccaaacaaaagggcattaaactttttgcgatcaccgatcatggcccggatatggaagatgcgccgcatcactggcacttcattaacatgcgtatctggccgcgagtggttgatggggtagggatcctgcgcggcatcgaagctaacattaaaaatgttgatggtgaaattgactgcagcggtaaaatgtttgacagcctggatctaattattgccggttttcatgagccggtttttgcgccacatgataaagcgaccaatacacaagcgatgatcgccactatcgccagcggcaatgtgcatataataagccatcccggaaatcccaaatatgaaatagatgtgaaagccgttgctgaagcagccgcgaaacatcaggtggcgctggaaatcaataattccagttttttacacagtcgtaagggcagtgaagacaactgtcgtgaggtagccgcagcggtacgtgatgctggaggttgggtggcattaggcagcgattctcacaccgcgtttaccatgggggaatttgaagagtgtcttaaaatcctcgacgcggtagattttccgccagagcgcattttgaatgtttctccgcgccgcttactgaacttccttgaatctcgcggtatggcaccgattgcggaatttgcagacctttaattactagtaatggaaatatattaatgaacgagttttctatcctctgtcgtgtgctgggtagcctctattaccgccaaccacaagatcctttactggtgccgctgtttaccctgattcgtgaggggaaactggctgcgaactggccactggagcaggatgagttgctgacacgtttgcagaaaagctgtgatatgacgcaagtctctgccgattacaatgcgttgtttatcggcgatgaatgtgctgtgccgccatatcgtagcgcatgggttgagggcgcgacggaagcggaagtgcgcgcttttctttctgagcgagggatgccattagcggatacgccagccgatcacatcggcacattgctgctcgcagcttcctggctggaagatcagagtacggaagatgagagcgaagcactggaaacactgttcagtgagtatctgttaccctggtgtggtgcgttccttggcaaagtggaggcccatgcaaccacgcctttctggcgcaccatggcaccgctaacccgcgatgccattagtgcaatgtgggacgagctggaagaagattctgaagaataagtgtgatctacgtcactcataactgcaacggataatttgttgttgcataaaatgtgtgctcgatctcattcatggccgcgttttctgctatcatgcgcggcatgaacatacttctctctattgcaatcacaacaggcattctctccggtatctggggatgggtggctgtttccctgggcttactaagctgggcgggcttcctgggctgtacggcctactttgcctgcccgcaaggtgggctgaaagggctggcgatctccgctgcaaccctgcttagtggcgtggtgtgggcgatggtcattatttacggtagtgcactggcaccacatctggaaattctcggttatgtcataaccggtattgtcgcgtttctgatgtgtattcaggccaaacagctgctgcttagttttgttccggggacgtttataggcgcatgcgcgacgtttgccgggcagggtgactggaaactggtgttacctagcctggcgcttgggctgatatttggttacgcaatgaaaaacagtggcctgtggctggcggcgcgtagtgcaaagacggcgcaccgtgagcaggaaatcaaaaataaagcgtgaggggcactcacgctttcgcttaaacagtaaaatgccggatgataattccggcttttttatctgtcaggattccggtggaacgctcatatggcggtatttcaccagaatgtcattctgccgttctgctttattttgcaaatcccacagaccacggtcgataccatcattaatcaggaaaatgacccctgtttcgatagcgctcatcaggcacagcataacaggttcgttgctggtgtaacccacttccccttcaagcaagcgctggtagtcaataaagcggaaaaccccggcctgaacttcataggaaagtatcgtcttactggtgttcacgctagaaaggatctcgccggtactcacattgacgacgcgcaggttcacggcaatctgatcgagctggtattgcgtgtcggcaccgatgccaaaatatcttgccccaaccccgccagatttgacgttgctttcataaccgataatgctaccttcaaccatgatatttgccgccgttaaagattgcagcgggattcggttattaatggcaaccgtgccgttttcttgtgccgcacgaataatcttgcgctcgttaagcaggttttgtaagccctggcgctccagcggtataaaccagcgagaatctttcagtgccgtgaccagcattgccgtggcgctttgcggaacagcagtggagaagttacttgccgggtagggtttaaattgcccggtttcgtcctgaatgttgtatacgctaacaaagattttacccgtcggcgctggcagatgggtcaaatctttgtagctctgagcacgaggcattaatgtcggtctggcggcttctttaggcggggcggttaagcatccgctcagtaacatgacggcaaccaaaagaaataagcgctgcatgattattttccttatgaagctggggcttaaaaatcggtactgttattttgtaaaccgctaacctggatggtgctggtttgtccggttttacgatctgtcacgttcaactgcaattgaccatcgcggttggcaatatcgacaatataatcgttggtcaccatgcggcccggtttaccggtattaatattgctcagtagcccacctaaaatttgactctggatggcctgagtaaagttatctaacgcactgggtgtttcaataccaaagtcatcgttatagctcggatctttataagagttttgggcctgagcgctatttaataaaaaagcgccattatttgggttaccaccaaagtttggattacggaactggaaagtcatggttccagcccaacttaatgggctaataagcatgagtagaactactgcatgtttgacacgcattgcagcctccgaacaattttttatttagaattcatcatgcgccaaatcgcccgtacttaataacgcctgatttatctggcgacgatttagtgcttcttcagtttgaatcagtgcaaagacgacagttttctcgaagtctcttttcaacggaaataaaaaagtctggaaaataacgtcctgattgaccgttatagtgatccagcttccccatcgtgcactgggcctttcattaatcgttaagttacccgtatagtcactttcccatttatcactaaaggctcggtaaaaatcatggccaatagaactaacagtatggtcagttagcaatcccgggacttctacctcaacggcgtgaagattccctgcggcgaacagaaattctgccgccacaatccagcgtaaataacgtttcatggctttatcgcctgaggttatcgtttgcccaggaaaccgcttgtgtccggttttttacggctatcttcttgaaaagattataaagatgcgttttaaccgtattttcgctgatgaacaagctacgagcgatctcgttattagacgcgccgatacgcagcttattcaggatctctttttcccgatgagtaaggagggcactttccgtgctgttataacgatagttaccactatgcgtaatcaggtagctggcaagcttttgcgtaaagtagcattcgccgcgcaggacgccttgcaacccattgacaacacgttcttgatcctccatggaataaaaaacgccgttgatatgaggccagttttcaatgtcgcggtacgggtaatcttcaggcgtatttagcaacaatattttgatattgttgtttttcctgctcaaagtatcctgccaataatggataagctttttatccgcttccatcatatccagaagaataatagagccactagagatatcgtccagagaacgttgaatattatgtaattttcctgtaattgccaggctttgtttaaggtgctgcaagagagctgtcgcctgcaaagaagatttagtgatcaacaataatgtatgaccatgaatactatggacttcattaaacatgatgaaaccccgctttttttattgatcgcacacctgacagctgcctctaaaatagaagcaccagaagtactgacagatgttgcactgctgtgtgtagtaataaatcagccctaaatgggtaaaatataaaactaatggattacatctgatttcaatctagccattacaaatcttaaatcaagtgttaaacatgtaactaaatgtaactcgttatattaaaatgttaaccttaaggttttattaagtttagaaatgatagaaaagttgtacatttggtttttattgcacaattttaaaaaatcatacaaatggtgataacttactaataatgcatataaaaaatatttcggtgtagtcctttcgtcatgtaaaacgttcttgttttttctccacacctccgtggacaattttttactgcaaaaagacgaggtttgtcacggcttgtgcgcaagacatatcgcagcaatcagcgacgggcaagaagaatgactgtctggtgctttttgatagcggaaaacggagatttaaaagaaaacaaaatatttttttgcgtagataacagcgtatttacgtgggttttaatactttggtatgaactaaaaaagaaaaatacaacgcgcgggtgagttattaaaaatatttccgcagacatactttccatcgtaacgcagcgttaacaaaatacaggttgcgttaacaaccaagttgaaatgatttaatttcttaaatgtacgaccaggtccagggtgacaacatgaaaaacaaattgttatttatgatgttaacaatactgggtgcgcctgggattgcagccgcagcaggttatgatttagctaatagtgaatataacttcgcggtaaatgaattgagtaagtctagttttaatcaggcagccataattggtcaagctgggactaataatagtgctcagttacggcagggaggcagtaaacttttggcggttgttgcgcaagaaggtagtagcaaccgggcaaagattgaccagacaggagattataaccttgcatatattgatcaggcgggcagtgccaacgatgccagtattagccaaggtgcttatggtaatactgcgatgattatccagaaaggttctggtaataaagcaaatattacacagtatggtactcaaaaaacggcaattgtagtgcagagacagagccaaatggctattcgcgtgacacaacgttaatttccattcgacttttaaatcaatccgatgggggttttacatgaaacttttaaaagtagcagcaattgcagcaatcgtattctccggtagcgctctggcaggtgttgttcctcagtacggcggcggcggtaaccacggtggtggcggtaataatagcggcccaaattctgagctgaacatttaccagtacggtggcggtaactctgcacttgctctgcaaactgatgcccgtaactctgacttgactattacccagcatggcggcggtaatggtgcagatgttggtcagggcagtgatgacagcagtatcgatctgacccaacgtggcttcggtaacagcgctactcttgatcagtggaacggcaaaaattctgaaatgacggttaaacagttcggtggtggcaacggtgctgcagttgaccagactgcatctaactcctccgtcaacgtgactcaggttggctttggtaacaacgcgaccgctcatcagtactaatacatcatttgtattacagaaacagggcgcaagccctgttttttttcgggagaagaatatgaatacgttattactccttgcggcactttccagtcagataacctttaatacgacccagcaaggggatgtgtataccattattcctgaagtcactcttactcaatcttgtctgtgcagagtacaaatattgtccctgcgcgaaggcagtagtgggcaaagtcagacgaagcaagaaaagacccttagtttgcctgctaatcaacccattgctttgacgaagttgagtttaaatatttccccggacgatcgggtgaaaatagttgttactgtttctgatggacagagtcttcatttaagtcaacaatggccgccctctagtgaaaagtcttaatttgttgaaatatcgagcataagatgaatctggagagaatggtctgctgcgaatcagccaacctgaaagtatggataacacaaccctcaaggatgactaatcattgaggaaatagaataaatgttcagaccttttttaaactctcttatgctcggcagtttgttttttccttttattgccattgctggaagcaccgtgcaagggggcgtgatccatttttatggccaaattgtggaaccggcatgtgacgtcagcacccagagtagtcccgtagaaatgaactgcccacagaatggttctattccgggcaaaacctactccagcaaagcgttaatgagcggcaatgtcaaaaacgcgcaaatagccagtgtaaaagtgcagtatcttgataaacagaaaaagctggctgtaatgaacatcgaatataactaagtttctgaacaactcacgttgctgagcagaaaaatgcgatttaaccaaaaagcctgctgtacacttaagaaacaagaaggtgtaaggaggcgttatgaaaacgcgtattcatgttgtgcagggtgatattaccaaactggccgttgatgtgattgtgaatgcggctaatccgagtttaatgggaggcggcggcgtcgatggggccattcatcgcgcagcgggtccggccctgctggatgcttgtttaaaagtcaggcaacagcagggcgattgccctacggggcatgccgttattacgcttgcaggcgatcttcccgctaaagccgtagtgcacaccgtcgggccagtctggcgtggtggtgaacaaaacgaagaccagcttttgcaggatgcctatctcaatagcctacgactggtggcggcaaacagctatacgagtgtggcttttcctgcaatcagtactggggtttatggttaccctcgtgcggcagcggctgaaatcgcagtaaaaaccgttagtgaatttattacccgtcacgctttacccgaacaggtatactttgtctgttatgatgaagaaaacgcccacctctacgaaagactccttacccaacaaggagatgaatgatttgccccggctggcgagcgcggtgctgccactgtgtagccaacatcccggtcagtgtggcctttttcctctggagaaaagtctggatgcgtttgccgcccggtatcgtctggccgaaatggcagagcatacgctcgatgttcagtattacatctggcaggacgatatgagcggtcggttactgttttccgccctgttagccgcagcaaagcgtggcgttcgcgtccgtttgttgctggacgacaacaatacgcccggacttgacgacattttacgcttgcttgacagtcatccacgcattgaagtccggctttttaatcctttcagctttcgcttgctgcgtccgcttggttatatcaccgacttttcccgtcttaatcgccgtatgcacaataaaagtttcactgtcgatggcgtggtgaccctggtgggaggacgaaatattggtgatgcctattttggagcaggggaggagccactttttagcgatttagatgtcatggcaataggacccgtggtagaggacgttgccgatgatttcgcccgctactggtattgcaaaagcgttagtcccttacagcaggtgctggatgtcccggagggtgaaatggcggatcgcatcgagttacccgcctcctggcataacgatgccatgacgcatcgttatttacgcaaaatggaatccagtccatttataaatcatctggttgatggaacattgccgcttatctgggcgaagacacgtttattaagtgatgatccggcgaaaggggagggcaaggcaaaacggcatagtctgttaccgcagcgcctgttcgatatcatgggcagtcccagtgaacgcatcgatattatctcttcctattttgtaccgacacgcgcaggtgtggcgcaactcttacggatggtgagaaaaggggtaaagattgcgatcctaaccaattctcttgccgctaacgatgttgctgtcgtccatgccggatacgcgcgctggcgcaaaaaattgctccgctatggcgtggaattatatgaactcaagccgacgcgtgaacaaagtagtacgttacacgatcgcggcataaccggtaattccggagccagcctgcatgctaaaacctttagcatcgatggtaaaacggtgtttatcggctctttcaatttcgatccgcgtagtacattgctcaatactgaaatgggcttcgtgatagagagcgaaacgctggcacagttaattgataaacgctttattcagagccagtatgatgcggcctggcagctccgtctggacaggtggggacggatcaactgggttgatcgtcatgcaaagaaagagattattctcaaaaaagaacccgccaccagtttctggaagcgggttatggtcagactggcgagcatattgcccgtggaatggttattgtaaatgtggcttaacgggctggtgctttatcgttctcacgcttaacaaccggtttaccagagaacaaaaacttcagtaacgggatgcgcaaatgaatttcatacagaattatcgcaatccctactacaaatatcaggccacagagaaaaccaagccagttggaggtgatgtgcggtgtaatgtatgcgccgaaaaacagcgttaacgggtggtgaaccagatagataaacaggcttgcgttaacaaaataagtcacccgcgcactctggaagttaagcaaacggtggccaaaggagaagaccacattcaccatccacagaccgaggaccatggtgatcacgctctcggtttcgtacatccaggcatcgccactgccatagcgctggttgagtaaataagcgacaaacgccaatgctgctgcaagggtacagccacgagacggcgtggtaaacaaggctttaagatgagggaaaatgaaagccagtgcgccgaggataaagaacggcaaataaaacagcgtttgcatgacaataaaattgaacatgccattactcagaatgggcggatacacaataaaaatcgttcttcttattaccgcataaccgatgccgaggcataaaaaaatcacgcttagttttaccatgctgaattttttattcgttttatcagaattttctaaattatttctgatgcgcttaaatatccatacgcacagcgtcgtcatgaccactaacaccagtaaaaaccacaggtgacttattaattcccaggccaacgtattatatttgtcatacaaactcagcccaggccaactttccgcttttcctttgacatattgcagcataataaattgcggtaatgtcagtagggggatggctgttaacatcgggatacctacacgttcgacacgtactttccaccattttttcaagggatagcgtaaaaaaagcatgtaggaaaagtagccggatataacgaaaaatacctgcatgcggaagctgtggatgaagtcattaaaaagggtcagccacaaactactttcggcgctattcacatgccatgtatggctgctatagattaaagaaatatgaaaaggtatccctaacaacatcagccaggcgcggatggagtcgaggaaatattcacgttgcgcgggtactgggttcatatatggttaactaatctcggatttttcgtcttatccctgtcgggttatgcctttaggcttgttgccatagtgacaccgacctgaccgcgccaggcgcaggcttcaaggtttttatgcatagcatcatcgctaccactaaccagaatggaagcgtctgtaagacggttgataaataaatttgctggcaaaccctacacgaagtcgatgcttctgtctttaggagaagcacggaaagtgaaaacggttgcaatcaggtgcttaatccatgagccagcgtgctgaacgataccgggattctgttgtcggaatggctggttatccattaaaatagatcggatcgatataagcacacaaagggggaagtgcttactaattatgaaacataaactacaaatgatgaaaatgcgttggttgagtgctgcagtaatgttaaccctgtatacatctagtagctgggctttcagtattgatgatgtcgcaaagcaagctcaatctttagccgggaaaggctacgagacgcccaaaagcaacttgccctccgttttccgcgatatgaaatacgcggactatcagcagatccagtttaatcatgacaaagcgtactggaacaatctgaagaccccattcaaactcgagttctaccatcagggtatgtacttcgataccccggtcaaaataaatgaagtgactgccaccgcagtcaaacgaatcaaatacagcccggattatttcactttcggcgatgttcagcatgacaaagatacggtaaaagaccttggctttgccggttttaaagtgctttacccgatcaacagcaaagataaaaacgatgaaatcgtcagcatgctcggggccagctatttccgcgtgattggtgcaggtcaggtttatggcctttctgcccgcggcctggcaattgataccgccttgccaagcggtgaagaatttccgcgcttcaaagagttctggatcgagcgtccaaaaccgactgataaacgtttaaccatctatgcattgcttgacagcccgcgtgcgacaggtgcttacaaattcgtggttatgccagggcgtgacacggttgtggatgtgcagagcaaaatctatctgcgcgataaagtcggcaaactgggggttgcaccgttaaccagtatgttcctgtttgggccgaaccaaccgagccctgcaaataactatcgtccggagttgcacgactctaacggtctctctatccatgccggtaatggcgaatggatctggcgtccgttgaataacccgaaacatttagcggtcagcagcttctccatggaaaacccgcaaggctttggtctgttgcagcgcggtcgtgatttctcccgctttgaagatctcgatgatcgttacgatctccgtccaagcgcatgggtgactccgaaaggggagtggggtaaaggcagcgttgagctggtggaaattccaaccaacgatgaaaccaacgataacatcgtcgcttactggacgccggatcagctgccggagccgggtaaagagatgaactttaaatacaccatcaccttcagccgtgatgaagacaaactgcatgcgccagataacgcatgggtgcaacaaacgcgtcgtagtacgggggatgtgaagcagagcaacctgattcgccagcctgacggtactatcgcctttgtggtcgattttaccggcgcagagatgaaaaaactgccagaggataccccggtcacagcgcaaaccagcattggtgataatggtgagatagttgaaagcacggtgcgctataacccggttaccaaaggctggcgtctggtgatgcgtgtgaaagtgaaagatgccaagaaaaccactgaaatgcgtgctgcgctggtgaatgccgatcagacgttgagtgaaacctggagctaccagttacctgccaatgaataagacaactgagtacattgccgaagactgatatccgcgccgttcatcaggcgctggatgccgaacaccgcacctgggcgcgggaggatgattccccgcaaggctcggtaaaggcgcgtctggaacaagcctggccagattcacttgctgatggacagttaattaaagacgacgaagggcgcgatcagctgaaggcgatgccagaagcaaaacgctcctcgatgtttcccgacccgtggcgtaccaacccggtaggccgtttctgggatcgcctgcgtggacgcgatgtcacgccgcgctatctggctcgtttgaccaaagaagagcaggagagcgagcaaaagtggcgtaccgtcggtaccatccgccgttacattctgttgatcctgacgctcgcgcaaactgtcgtcgcgacctggtatatgaagaccattcttccttatcagggttgggcgctgattaatcctatggatatggttggtcaggatttgtgggtttcctttatgcagcttctgccttatatgctgcaaaccggtatcctgatcctctttgcggtactgttctgttgggtgtccgccggattctggacggcgttaatgggcttcctgcaactgcttattggtcgcgataaatacagtatatctgcgtcaacagttggcgatgaaccattaaacccggagcatcgcacggcgttgatcatgcctatctgtaacgaagacgtgaaccgtgtttttgctggcctgcgtgcaacgtgggaatcagtaaaagccaccgggaatgccaaacactttgatgtctacattcttagtgacagttataacccggatatctgcgtcgcagagcaaaaagcctggatggagcttatcgctgaagtcggtggcgaaggtcagattttctatcgccgccgccgtcgccgcgtgaagcgtaaaagcggtaatatcgatgacttctgccgtcgctggggcagccagtacagctacatggtggtgctggatgctgactcggtaatgaccggtgattgtttgtgcgggctggtgcgcctgatggaagccaacccgaacgccgggatcattcagtcgtcgccgaaagcgtccggtatggatacgctgtatgcgcgctgtcagcagttcgcgacccgcgtgtatgggccactgtttacagccggtttgcacttctggcaacttggcgagtcgcactactggggacataacgcgattatccgcgtgaaaccgtttatcgagcactgcgcactggctccgctgccgggcgaaggttcctttgccggttcaatcctgtcacatgacttcgtggaagcggcgttgatgcgccgtgcaggttggggggtctggattgcttacgatctcccgggttcttatgaagaattgccgcctaacttgcttgatgagctaaaacgtgaccgccgatggtgccacggtaacctgatgaacttccgtctgttcctggtgaagggtatgcacccggttcaccgtgcggtgttcctgacgggcgtgatgtcttatctctccgctccgctgtggtttatgttcctcgcgctctctactgcattgcaggtagtgcatgcgttgaccgaaccgcaatacttcctgcaaccacggcagttgttcccagtgtggccgcagtggcgtcctgagctggcgattgcactttttgcttcgaccatggtgctgttgttcctgccgaagttattgagcattttgcttatctggtgcaaaggaacgaaagaatacggcggcttctggcgcgttacattatcgttgctgctggaagtgcttttttccgtgctgctggctccggtacgcatgctgttccatacggtcttcgttgtcagcgcgttccttggctgggaagtggtgtggaattcaccgcagcgtgatgatgactccacttcctggggtgaagcgttcaaacgccacggctcacagctgctgttagggttagtgtgggctgttgggatggcgtggctggatctgcgtttcctgttctggctggcaccgattgtcttctcgttgatcctgtcaccgtttgtttcggtgatttccagccgtgccaccgttggtctgcgcaccaaacgctggaaactgttcctgatcccggaagagtattcgccgccgcaggtgctggttgataccgatcggttccttgagatgaatcgtcaacgctcccttgatgatggctttatgcacgcagtgtttaacccgtcatttaacgctctggcaaccgcaatggcgaccgcgcgtcaccgcgccagtaaggtgctggaaatcgcccgtgaccgccacgttgaacaggcgctgaacgagacgccagagaagctgaatcgcgatcgtcgcctggtgctgctaagcgatccggtgacgatggcccgtctgcatttccgtgtctggaattccccggagagatattcttcatgggtgagttattacgaagggataaagctcaatccactggcattgcgtaaaccggatgcggcttcgcaataaaaacgtagttgcctgatgcgctacgcttatcaggcctacatcgttcctgcaatttattgattttgcaagactttgtgggtcggataaggcgttcacgccgcatccggcaaaaacaacgagccaataaaaataccggcgttatgccggtatttttttacgaaagaggtatcaaatgcgtttaattgtggtgagcatcatggtgaccttgctgagtggctgtggcagcattattagtcgcactataccggggcaggggcatggcaaccaatattatcccggtgtgcaatgggatgtgcgtgactccgcctggcgttatgtcacgatccttgatctgccattctctctggtttttgatactttactgctgccgatcgacattcatcatggcccgtatgagtgattaacgttcatcccactcatcagctgctgcgcgtccttcctcggtatccagcggtggctcaagctgaaattccccctcgtcccattcatgtaatgtattctcttcctgccactcctggcgtatctctatctcatcatagtcgccatcaaaaacactttgcgcggcttcaccgctaagcataggtaaacattcaccttcttccccttcgtcggcaaaaaactcaacttgccacatgatgtcgccgtcctgcaaaacgtatttttgggcattgaactgttgcacattcgcatcttcggcgtcgatgccggggttgtctgcaagaaattcttcgcgtgcagcgtcaatggcttcttcaagcgttgcgtacatggtcatcacgattctccctttgagttgatgaggtttcagggaaaaggatagctgattctccgcttttgcaagtatgaaaggcgaaaaatcagttgcttacctggggtattcgacgacgacgtagactgttccaactatagactgcgttgaataacactacgccagcggtgacgagaaataccgctctgaaaccgtagttcgcactaatcgctgctcccatcaatggtccggtaacgttgccaatatcacgaaagctttggttatagctgaagatacgcccggcgatctggttgctgctgttgtaaaccaacagtgtctgtacggcggggagtagtgcaccatcggcggcaccgagcaaaaaacgtaaaatcccaagttgcaatggcgtctgaacgtaagacattgggatcaacagcagtacagaaaagatcagcgctgtaatcaggatcttttcgggtccgattcgatcgccaagtttgccgagtcgtggtgcacttagcagagccgccacgcctggcacgctggcgatcatgccactgataaaggcgacgttactgacgttacccgccagttcgcggacatacagcgtcagaatgggggcaatactgcccgtcgccacctggatgattaacgtagtgacaaacaggctgagtaccagtttcgggtttttaagacttgtcaccacttcccgcatgtgcagcatctcttttttgctgaccggctggaatttttctctgatgcaaaacagggtgacgaaaaagcagagtatgagcacactggcggtaataaagaataccggacgtaagccgtagctatcggcgagcaggccgccagccattgggccgagcaacgcaccactaacgccgcctgtggagagcgtacccagcgcccagccgcttttattacgcggtacttgtgtggcgataagagcattagcgttggggacaaatccgccaagtaacccaagaagcgcccgcaggatcaaaaactgccagatattttgtgccagccccatcaacaccatcacgatgcccatgccgagggcagagcgtaatagcatgagttttcggcctttacggtcggcgagtccaccccaaaacggactggcgatggcgctaaataaaaatgtaatgctgaagacaataccggaccacatattcagggcggagtgaccggtaacgccaagctgctcaacgtagaggggtaagaagggcattaccagactgaaggcggcaccggtaagaaaacagcctagccaggcgacgatcaggtttcgtttccagtttataggggtgtcattttcacagggactcatagcaatccgctgttggtgcgccaggcgcggtgaacataagaagaaaagataagcacactaattatgcgcccgacttccagggggcgcaatccagagagcttttatcgctaaatcagggggatttgctgtggtaatgccggatgccattctgaagcatccggcatgggagatttaatagcgactaggaacgccttccgggcgtgttttaaagcgacggtgtaaccacatatactgctctggtgccatcatgatgcatttttcgaccactttgttcatccacgcggcggtagtttcggcatcatccagtggcggagaacactctggcggcagcataatcaattgataccctttgccatctggcttacggcgtggaacgaagggcaccagacatgcgccggacatccgtgccagcatccaggttccggtcgtggtcgcagcctgctcaacggcaaacaacgggacgaaaacgctactgcgcgggccgtaatcatgatccggtgcgtaccagaccacttcgccttttttcagggctttaatcatgccttttaaatctttgcggtcgagcatgcttttattactgcgcaaacggccccaggtttgtagccagtcaatcagtggattatcgttcgggcgataaacgccaatacccggttcctgcataccaaactgccgcgcacccagctccagtgtcagaaaatggatgccaactaacaggatgccgcgtttttgcgcctgcacgtcacgaatgtgttccatgccgatcacttccgtccagcgggcgattcggcggtccggccagaaccacgccatgccggtttccatcaggcccatgccaacggattcgaaattcttcaccaccattttacggcgttcttgttcgctcatttccgggaagcacagttccaggttgcgatgcacaatttttgcgcgtcgtttcataaaacgtaacgccagttttcctaatccacaaccgaggcggtagataaccgggtagggcaattgcacgactaaccaaagtacgccaatacccaaccaggttaaccaataacgcggatgaagcagtgcggtggagaacttgggtagattcgtcatatcaatcctgtttttcaacctattcgggcaattgtatgtattgtcgcattttttcgcccgcaaccaaaatttgtggctgaagactgggcgaaattgccgcgcttgtaaataacaaataatttttaatgcgcaaatgtagcgtaaaatgtgtggatgttaattatcgataattgctatatcatgccgcggatttttactttcccatctcgcaggaaccgtacaccatgccagtgttacacaaccgcatttccaacgacgcgctaaaagccaaaatgttggctgagagcgaaccgcgaaccaccattagcttttacaagtatttccacatcgccgatcctaaggcgacccgtgacgctttatatcagctgtttaccgcgctgaatgtttttgggcgagtgtatctggcgcatgagggcattaacgcgcaaatcagcgtacctgcgagcaatgttgaaacatttcgcgcgcagctctatgccttcgacccggctttagagggtttacgcctgaatatcgcgttggatgatgacgggaaatccttctgggtactgcgcatgaaggtacgcgatcgcattgttgccgacggtattgacgatcctcactttgatgccagcaatgttggtgagtatctgcaagcggcggaagtgaacgccatgcttgacgatcccgatgcactatttatcgacatgcgtaaccactatgagtatgaagtggggcactttgaaaacgcgctcgaaattccggcagataccttccgtgagcagctgccaaaagcagtcgagatgatgcaggcacataaagataaaaaaatcgtcatgtactgcaccggcggcattcgttgtgaaaaggccagtgcctggatgaaacataacggattcaacaaagtctggcatatcgagggcggaattattgaatacgcccgtaaggcgcgcgagcagggcttgccggtgcgttttattggcaaaaattttgtttttgacgagcggatgggcgaacgtataagcgatgagattatcgcgcattgccaccagtgcggcgcgccgtgcgacagccataccaactgtaaaaatgatggctgccacctgctgtttattcagtgtccagtatgcgcggaaaaatacaaaggttgttgtagtgagatttgctgcgaagaaagcgcgttaccgccagaagaacagcgacgccgtcgggcaggacgtgaaaatggcaataagatctttaataagtctcgtggacgtctgaatacaacactgtgcattcctgatccaacagaataaatatcattgccggatgcgtgccatccggcaacatttcacgcttacttctgctgtacgccttccacactaataatcagatccacttcctgagaagctggacctaaatctgtcttgatattgaagtccttgagcttaattttgccttcggcctcgaagcctgcacgtttaccaccccatgggtcgtcgccctgaccaattaatttcgcttccagcgtgacgggtttggttacgccattcagcgtcagatcgccggtaatatccagttcgtcaccgtctttcttcacgctggtggaggtgaatgttgcctgtggatattttgcggtattgaggaaatctgcactgcgaagatgtttatcgcgttcggcgtgattagtatcgacgctggtggtgttaattgtcacattcactttatcggcagccggatttttttcgtcaaaggtaaaagtaccgtcgaaatctttaaaggtgccgtataaccagctatagccaaggtgctggatgcggaaattaacaaaggcgtgctgaccttctttgtcaattttgtaatcggcggcaaccgcactaccggcagagaacatcagggacgcgaaggttaaaccaagcaggctttttttcattttttatactccatagtcagaactgctctttcccagcatgcgcttcagagtgtcgtctttatcgatgaaatgatgcttcagggccataaatccgtgcataacggacagtactacgacgctccacgcgagccaaaaatgcagggcaccggcaaagtctgcctgtgcgccagcgtcggcaagggtcgcggggacgtcaaaccagccaaaaacgctgatcggtttaccatcggcagtactgatcagatagccgctgatgccgatggcgaaaagcaataggtacaatgcgagatgtccagctcttgcggcaagacgagtcatggggctataactcggcagcggacccggcggtggagatatgacacgccacagaacgcgaataaccagccccatcattaacaaaataccgatgcttttatgcagttcgggtgctttgtgataccagccatcgtaataactgagcgtgaccatccacagacctaaagcaaacatgccgtagacaataattgcgcttagccaatggaaggccgcagatataacaccatagcgttcaggggtatttgtgaaactcataagtgcatccaaaacgaatttgcgagagaaagaaaatggcgtgtcggagaatgaattgcaacacaaaaataacaaattgaatgatatttatttttatttcaataattttgaattaataatgaaagaatcttcataagtttagtgggttcagcatcagagatgtctggtgagtgctgtagaagcaggaataatctcattcaatttttcacgctaaatgaaagggagattaaatatttgtcagtttatgtcagtgcggaaaattaaaaataaaacacatagatcagatccataattgccaacaatccccagagaaaaagataaagcatcagatgctcgcgaatattattgatgagatagtgcaacagccgacgcattaaatactcctgtaaaaacggcctcattctggaggccgtaatgatgattattggaagcgggaaagcctgaatggcgtcaaatcaaaatcgctttttttgtcttgcgcaaaatcggcagctatttcccctaaaacactcgcaaatttaaaaccgtgcccactcaggccggtaatgagcagtgtattatcgtggccgggtagggtatcgataataaaatcttcgtcagggctattatcataggtgcaggcagcgccgtacaggcagcaaccgatacccggcaatacattgcgcaagaacgggaaggcttcactcccatcactggccacttccgcaaacggaacacgttcatccgcactatggataacctggcctccgttatgtttgccaatcttcaacgcgtcgttttctgccggaaaaccataatattgatcgccattgggcagttcaccggtaaacgccgggaatttattcttcacgctatagcggccatcggcctgataccaggcaaatactttgcgtacgggctggacaggcagctccgggagcaggtcttttacccatgttcccgcgcagacaatcgcttttttcgcctgatactcaccgtcagccgtttcaatagttacgccatcatcgtcatgacgaattgcggtgaccgggcagttgaacagttgcgcacagcccgcttccttcgccagttggatccaggttttaatcgccagttcgctgcgcaaaaaaccggaatcagtttcaaataagccgatgtagttgtccgggacgcgtatttccggccagcgggccataatcccttgcgcatcgagcttttcaacgttgagttgccattgttcggcgctgtgggcgacgttggcgagaaatgtggaatcagccgggccaaggttaatgacgccagagcgtacaaaaatgggatcttcttcgttgtggcgggagagttcatcccacagcgtttgcgcgcggaggaccagcgggacatacttttcgccttcaccataagcatggcgaattaatcgcgtatcgccgtggtggctgccgtgttgatgcggtggcatatgggcgtcggtcattagcacgtttaaaccggcgcgggttgcataatacccggcggcagcgcctacggaaccgctgccaataatgatgagatcgtatttcatttttttctctctgctctcatggtttaagcagagtaattaactgaatgcagatatacaacccagaaatggtaaaggcaccggtgaggtgccttttgggtggatggtcatgtcatgttaatgacgccgatactcgtttacctggaaatcaccggattcaattttggcgattcctgcttctaatatgctaataaattgtctggcaacatcagtggttaaccagagcgtctgaccaacttcagtcccttcctgctcggacttatttggggtctggtagtgcaaacgcaacatcagcgcatcatagctatcaacggtgctgatgtcccaccctacgagcggatgagtctgaatgacttcattatttttttccatcatggccccctaattcgtgttactagacaacgttattcgaggttcaatgcgtttttatctgaagcaacttcagtataccaataagtaagggtattcaccgaatttttaaagggggaaacagataaatttctgcttttaagatttatatgaacaataaaacagcatgtcattcatatttttttagcatattgtgcaattattttgaggaagtgtagaaattttgtactcaaaattcgtaagtaaaataaaaaagccggggcgacccggcaaaaaaaatcactgcatattattcgctgacaaaccagtcatcggcgctttcccacgtttcctggagaatttcactaatgcgctgtttatcttcttttgtcgcgccaataacgcttaaattattcgctgcggcataacgtacgcttacgtggccttcattatcaggaaacgcatactgaatacggcgggaaagttcgccagccagggcgtcaatagccccagctggcaatggagaagttttcgctatggtgacttcaattcgcataatagccccctgttgaatatactggttatttatacaggtaaaataacctaatgacaacaggaagctacgatttttattgtttaacggaccagcgtaccgtttccccggcgaggaatggcaccagcgtgtcatcagtcagtgcgatgctttcagcaacctgttgctcttcacgtaccagttcgatgaatgtgtcgttgaccggcaacccatagaactgcgggccgtttacagaacagaatgcttcaaagtgctgcaaagcattcatttcttcaaagacggtagcgtaactgcccagcgcggttggggcgttgaagcagcccgcgcagccgcaactgctctctttgcgatgacgtgcatgtggcgcagaatccgtaccgaggaatactcgattaaaaccgctggcgaccagttcacgcaatgcctgttggtgaatattacgtttgaggatgggtagacaatacaggtgcggacgcacgcctccaaccagcatatggttgcggttaaacatcagatgctgcggagtgatggtggcagccagccgttcatttccgtcacggacatagtcggcagcatctttggtggtgatgtgctcaaaaacgactttcagcgcagtcaggcgctggcgcagaggttccatcacgctttctataaagcgcgcttcacgatcaaaaatgtcgatatctgcatgtgtcacttcaccatgcaccagtagcggcataccgattttttccatgcgctcaagtaccggcatgattgcgtcaatactcgtcacgccgtggctggagttagtggttgcgtttgccgggtaaagttttgcagcggtgaacacgccttcgttaaatccgcgctccagctcattaggatccaggctatctgttaaataacaggtcatcaatggggtgaaatcgtgcccggcaggtacggcgtcaagaatacgctggcgatacgccacggcagcctcaacggtggtcacgggcggagccagattgggcattacgatagcccgtccataaatttcgctggtatatggcacgacagtttttaacatgtcgccatcgcggaggtgaaggtgccagtcgtctgggcggcggatctttaatacctgggatggtgcagtcattaatctctatgctccggctgaagggatgtttttgccggacacaaaggataagcggaaacgttttcctttgcacgaaaaataaagggcgcgaatgcgccctcgtgattaatcagtaaatggaatgacaatttcgcctggcttcacttcaatgcctttcgccagttttttcgccattgcttcgccctggctgccatcttcgcgcaggacgtaagcaggttgctggttaaagtaattgcgtaatgcctggttcaaatagggaagcaacgtttgcatcaccgtttgcattttttccggttgtaccgtcgcatcgaccacttccatctctttcaggaagatcgcacctttttctttatcaaacacgggcagcgctttcagcttcagtttcatggtcgctttctgactaccgaacagggagttcatgtccagattggcgtctccggttagggtaaccttattcggctcttcgcgaccaatttggctggtcaggtttgtcagaacaatatgggcgtcagccacgccgggtaaaccgatatctttactgaaattattatgtttcgcaaggctctggttaatttcttgttcggtgatggtgtattgggtgagttgattacagccaacgagcaggccactgacgatcaatgcagcggcaaataaaaacttgttcatggtagtcctcgacatgaaatctgcgtcaatatcctgacacaacgcagcatgtgtcaccagcgataaactcgccagcagaaaaaactgaaaacggcggcaacccgcgaatacaggctgccgcggcgggtcaggattaaatcgccatactacttaacaaattgatttgtgtctgtttcgccatattatcgcggtaatcagcaacgcggcttggccagttaattccggctaccagcgtcagattacgcagtagcgggaatagctgaatatcatcttcgctaagttcgccattcacggcgttcggtttgacgatcagtttgtccagcgcacgtaaatcatcgctgatattcttaatcagaccgtcagagtgggccagcaggtcggcaaaattacccgcgctggcctctttcttgtcgacgaaatatttgcgcgcggcgggagtagaaaactcatcaaatgcgcttttggcaaaacgcggcaacagcagtttgttggcgtagccattgaccttgcgcagccactcttcaatggcaggggaacgtttgccggtcagtaacggtttgccgtcgagtttatcgacatagtgaacgatgtccatgctttctggcatatagcggctgtcatctttttgcagaatgggaacctgtttttgaccgaccatccgggtgggtgtttctgcgtcgtcgttgagcagaacatgtaattcgacggggatatttttcaggccgaaaatcatgcgggctttgaggcagtaagggcagtgatcgtaaatgtatagcttcacgtgactcctccatttggctgtcagttcactttcagtatgaaggagtcaggggggagtatcaaatcaggcgtcgcgttcaagcaaacgacgcgcggcgcgtttctggctaaactgccaacccagcgcaaggaaagtgaagatgccaataatgcccagcatcatccacggaagctctggctggtgcgcgcttttgcccaggtcaaacagccagccgccaccgatataaccaatagcgccgccaatcgccagacccagacggctaaaccccatatagctgccgcgagctcttgcgtccgccaggctagcacttaaggtttcacgcgcaggctcggcaatgatgctcccgatataaaacagacaaatcagggtgaaaagttgttgcaggccgctgaccatgcccaccggcatcatgcttaaactcattatcaacagcccagccatcaaccggtgttccagacgaaaatgcttttcactccagcgggcgatagggtagagcaacgttaagctcagacacgcttcaatggcatacatccatttaacggcagagggcgcgcagccacgtcgttgaccataattggcagcatcagcatcacttgtacagccagcatgtagtaacccgccagcgtcagaacataggtgacaaaacgcttgtcacgcatcacgcgggtcatgccttcgcgaacgggcgtgcgtacggtggagagtttccatgctggtaacaaccacgcattgaacgccgcacatagcacaaatagaactgcccctgtggcgcagaccaggcgaaagtcgtattgcaacagccagctccccaacaatgcgccaatgaccgcaccggcactgtcctgcatcatcaacaggctgaaaaaacgaccacgctgctgtggacggattaatttcaccaccagcgcgctacgcggcggatcaaacaacgtgccaccgagtccgctgagcaggcaactaaaccacaatagccacggttcgtgggcgatacccattgtggcgaatccggcggcgcgcatcagcataccggtaacaatcatcggtttggcaccaaagcggtcggcaattgcaccgccgaaaatacccagaccttgctgaataaattggcgtagaccgagagcaataccgaccatgacggcggcccagcccatttgatcaacgaagcggatagagatcagcgggaagacaacaaagaaccccagcacgaccagcatattatcgatgagcaggaaatatttacccaggttcctcgcctggctcacgcgggacatttcccctcccgggaaataaaagatgagcactttctattctgcattgccgctaagacttttcccatcacttcggggacaatatttttttatcaaaacgtcgctttgatagagagtttttatcaaatatgtgaataatgcagaaaatggcattttggacttttcacagggtctggttgcgcaggtatagtaatacttacagcgtattaaagacgttacgggaaggagtaggtatagaatgtttggctatcgcagtaacgtgccaaaagtgcgcttaaccacagaccgactggtcgtgcgtctggtgcatgatcgtgatgcctggcgtcttgcggattattacgcagagaatcgccatttcctcaagccctgggagccagtgcgcgacgaaagccactgttatccaagtggctggcaggccaggctggggatgattaacgaatttcataaacaaggtagtgctttctactttggcttattcgacccggacgaaaaagagattattggcgttgccaatttttccaatgttgttcgtggctcttttcatgcctgctatctcggttatagcattgggcaaaaatggcagggcaaaggactcatgtttgaagccctgaccgcagccattcgttatatgcagcgcacccaacatattcatcgcattatggctaattatatgccgcacaataaacgcagcggtgatttactggcgcgactgggttttgaaaaagaaggctatgcgaaagactatctgttgattgatggacaatggcgcgatcacgtactgacggcattaactaccccagactggacgcccggccgctaaggagaatctcatgaaatatcaacttactgcccttgaagctcgcgtgattggttgcttgctggaaaagcaggtgaccacgccggagcaatacccgctcagtgtcaatggtgtagtcacggcctgtaatcagaaaacgaaccgtgaaccggtcatgaatctgagtgaatccgaagtgcaggaacagctggataatctggtcaaacgtcattatctacgcacagtgagcggttttggtaatcgggtcaccaaatatgagcaacgtttttgtaatagtgaatttggcgatctgaaactgagcgcagcggaagtggcgttaatcaccacgttgttattgcgtggtgcccagacgccaggtgaactgcgcagccgcgccgcgcgaatgtatgaattcagcgatatggcggaagtggagagcacgctggaacaactggcaaatcgcgaagatggtccttttgtggtgcgtctggcccgcgaaccgggtaaacgcgaaaaccgctacatgcatcttttcagtggtgaggttgaagatcagccggcggtgacggatatgagcaacgcggttgacggtgatttacaggcccgcgtcgaagccctggaaatcgaagtggcagaactgaaacagcgtcttgatagcttgctggcccatctgggagattaaagtgaaaaaattacgtatcggcgtagtgggattaggtggcattgcgcaaaaagcgtggttaccggtgctggcggcagcgtctgactggacgttacaaggagcctggagccctacgcgcgcgaaagccctgccaatttgtgaaagctggcgcattccttatgccgatagcttatccagccttgccgccagttgcgatgcggtttttgtgcattccagcaccgccagccactttgacgtggtcagtacgttactcaatgcgggggtacatgtctgtgtcgataaaccgctggcagaaaatctgcgcgatgctgaacggctggtggaactggcggcgcggaaaaaactgacgttgatggtcggttttaaccgtcgtttcgcaccactctacggtgagttaaaaacgcaactcgccaccgcagccagcctaagaatggataaacatcgtagcaatagcgtcgggccacacgatctttatttcacgttgctggatgattatctgcatgtggtggataccgcgctgtggttgagcggcggcaaagcctctctggatggcggtacgctactgactaacgacgctggcgaaatgctgtttgccgagcaccattttagcgctggtcctttgcagatcaccacctgtatgcatcgccgtgccggaagtcagcgtgaaaccgtgcaggccgtgactgacggtgcgctcatcgacattacggatatgcgcgaatggcgtgaggagcgcgggcagggcgtagtgcataaaccgattcctggttggcagagtacgcttgagcaacgtgggtttgtcggctgtgcgcggcacttcattgaatgtgtgcaaaaccagacagttccgcaaaccgccggcgaacaggccgtgctggcgcaacgtatcgttgacaagatctggcgcgatgcgatgagtgaataaaccctgtaacatctggcggtagcaattcaccataatccaggtagactattcgcctctttcagcgcctgccttgcaggcgttttgcccgtgggtctggattagaacaccgatgaatttattaaaaagcctggccgccgtcagcagcatgaccatgtttagccgtgtgcttggcttcgcacgagacgcaattgtcgccagaatctttggcgcagggatggcaaccgacgcctttttcgtcgcttttaaacttcctaacttgttacgccgtatctttgccgaaggggcattttcccaggcatttgtaccgattctggcggaatataaaagtaagcagggtgaagacgccacgcgggtctttgtctcttatgtttctggcctgctgacacttgcgctggcggttgtgacggtcgctggcatgctcgccgcaccgtgggtgatcatggtgaccgcgccaggcttcgctgacacagctgacaaatttgccctgaccagccagctactaaagattacctttccctatatcttgctgatctccctggcgagcctggtgggagcgattctgaatacgtggaaccgcttcagcattccggcgtttgctccaacactgcttaacatcagcatgattggtttcgcgctgtttgccgcaccgtactttaacccaccggtgctggcgctggcgtgggctgttacggtcggcggcgtcctgcagctggtgtatcagctaccgcacctgaagaagatcggcatgctggtcctgccgcgcattaacttccacgatgccggagcaatgcgcgtggtgaaacagatgggaccggcgatccttggcgtctctgtgagccagatctccttaatcatcaacaccatttttgccagctttcttgcttccggtagcgtgtcttggatgtattacgccgaccgcttaatggagtttccgtccggtgtgctgggcgtggcgcttggcaccattttgctgccgagcctgagcaaaagttttgccagtggcaatcatgatgaatacaaccgtttgatggactgggggttgcgtctttgtttcctgttggcgctgccgagtgcggttgcgttgggcattctttccggtccgttgaccgttagcctgttccagtacggtaaatttaccgcgtttgatgcgctgatgacccagcgggcgttaattgcctacagcgtgggtttgattggcctgattgtagtgaaagtgttggctcctggcttttattcccgccaggacattaaaacgccagtgaaaattgccatcgttacgctgattttaacgcaattgatgaacctggcgtttattggtccgttgaaacatgccgggctgagtctttctattggtctggcggcgtgtctgaatgctagcctgctttactggcagttgcgtaagcagaaaatctttaccccgcaacccggctggatggcgtttctgttgcgtctggtggtggcggtactggtgatgtctggcgtgcttttaggtatgttacatatcatgccggagtggagtttgggtaccatgccctggcgtttactgcgtttaatggcggtcgtgctggcggggattgccgcgtacttcgctgcactggcggtactgggcttcaaagttaaagaatttgcccgccggacggtgtaacaatgcattccggcctgcagtgttcgctttaaaacatatcatgaaactgggtatgttttgtctgcctgctctgggatcgctggggcgggcatttttttgcctattttgcattgttggttagcaaggatgccattcgatgaattttaatatgttgattcaaagatgaaataaaaaagccctgcagttaccagggcttgattactttgagctaattattactcaacaggttgcggacgcgcaggagcggcagaggcatgatgtgttgccgtatgaccacctgcggcacctttaccttcgaaggcaaaagtagggcgctgccagtcactgtgacgcggtgcctccggaacatattccggtgctggagcgcgcgtcattggcgcggtagcgtggttatgctcaacggtgacctcaggttcgaccgcagctaccgtttcaacttctgctgcgacttcagcgactactggcgcggcaggttgagcaacaacttcaggttcagcaactacaacctcagcagtttcgacaacttcttcaatatctgccgtctcttcctgcggttcaaccaccggttctgcttgttctgcaacttcctgggctacggcaacatcagactcggtaatcacctgcggctgttcagttaccgcggcagcgatcacttcaggatgcgtcgtttcaaccacttccggttgcggttcggcaacctgaacgggggcttctacgacaccggccacttcttcaacaactggcgcgctaacaaccggttcgatagcggcggcgacagggacctcagtcaccatcggctgcacatgtacttcttcctgttcgcgctgctcttcaacctgtacatcttgcggacgtacaattggatagcggatccagactttgccagaggccagttccggagacgcgcacgctacggtcaacggcattgggctctgggttggataacgctcgtcacgatagcgacgacgacgctgaccacttacgcgcaggtgacgagggctgcggcgagaacgacgcggcatgccaccgttgtcacggttatcagcattgttctcttcttgctgttctggtgcagtttgcgctacgactggcagcgggactttcaccagttctgtgcgtggagctggcgcttcctgaacaattggttcggcagcgacagtttcttcaaccaccggtgcgactaccgcttcttcggctacgctttgctcgtaacgcactttctgattgagctgacgctgtttacgacgcggctgaaccggacgtacacgttcttcctgttcggtttcctgaacagattgctcttcaacattcagcgccttcgcttcttgttgcgcctgacgtttatcatcattacggcggcggctacgttcacgacgcggcgcttgctgctcgtcggcggtacgcgctttttccgttacctcagcctgctgacggctctcacgcgtctcggcagtctgctgctgtgcctggcgacgattacgacggttttcttcgcgattatcgctgccttcagtacgttcactacgggtgtcgcggcgctcattacggtcacggcggttgttctgacgaggcttgcgacgatcctgttgacgttccggtttcgcttctgctttcggtgctggttgctcggtcggtttggtttcttcaccaccgctgaacagcgctttcagtgcgccgaagaagcggctcaacagcccaggttgtgcaggagctgctggtgttgccggtgcagctttcggtgctggagctacaacaggcgcggcaggttcagctggcgttggcgcaggcggcacatccggcatggcaaaggttgccagcgcaggttgttccggacgcttacgttcagcgaactcttcttcagacggcagcgccatcgcttcttcatgcagcttcggcagcatgtagcttaaggttggggtttcttcccctttacgcacgcgcagcacgtggtagtgcggggtttccatctgatcgtttggcacaattacacagcgcacaccgtcctgacgagtttcaatggcatttaccgcagaacgtttttcattcagcaggtaagaagcgattggcacaggaacaatggcgtgaacttcctgggtgttctctttcagcgcttcttcttcgatcagacgcagaatagagaggctcaggctttcgttgtcacgcacggtgccagtaccagaacaacgcggacaaacgtgatgactggattcacccagacttgggctcaggcgctgacgggacatttccagcaggccaaagcgagaaatatggctgatttgaatacgcgcacggtcctgacgcaccgcttcacgcagacggttttctaccgcacgctggtggcgtactggcgtcatgtcgatgaagtcgataacaatcaggccgccgaggtcacgcaggcgcagctgacgagcaatctcatcggcagcttcgaggttagtgttaaacgcggtttcttcgatatcgccgccgcgggtcgcgcgtgcggagttgatgtcgatggccgttaacgcttcggtgctgtcgataacaatggaaccaccagacggcagacgaacttcacgctggaaggcggactcgatctgactctcgatctggtagtggctgaacagcgggatctcgccggtgtacagtttgattttgctgctgaaatccgggcgacctaatgcagcgatatgctgacgtgccagttcgagcactttcgggttatcgataaggatttcgccgatgtcctgacgtaagtaatcgcggaatgcgcgaacgattacgttgctctcctgatgaatcaggaacggggccgggcggctttcagcggcttttttgatggcttcccagtgtttcagacggaagcttaaatcccattgcagcgcctcagcagatttgccgacgccagcggtgcgcacgataagccccatgccttccggcagttcaaggcttgccagtgcttcttttaattcggtacggtcgtcgccttcgatacggcgagaaatgccacccgcgcgcgggttgttcggcatcagaaccagatagctacccgccagactgataaaggtggttaatgccgcgcctttgttgccgcgctcttctttatcgatctgaacaatgacttcctgaccttcacgcaacacatctttaatgttgggacgaccatgagcactgtagttagcagggaaatattcgcgggcaatttcttttagtgggaggaaaccgtgacgttcagcgccgtaatcaacaaaagcagcttccagactcggttcaatgcgggtgattttacctttgtagatgtttgcctttttctgctcgtgccctggactttcgatatccaggtcatacagacgctgcccatctacaagggcaacgcgcaactcttcctgctgagttgcgttgattaacattcttttcatcgtaacttactcattattcttacattgacgactaagctgcgggcaaagtaacgcctttccgggtgtgaaccgatggcctcgtgtctagtcgcgtcgccaacctcacggttatcgtcagctcaaagaggcgcagagtgtgagttgcccgtttttcatgcggaaaaacagcgcaattatcaaagaaacagactgggtattactctccagaaatatttccatctaccggtaaggactgcaacccgcagcccgctaactgcctgaaagatcaatacgtcttacgccattgctgcgtggatgatcggtcgggcaaaatgggttattccgtaaaatttcttgttttaacaaggatggacacggaaacggcctcattattccactgcaagccttgttatagcaagatgacttttaccatttatcacccgcttactcacagttttttcacttcttgctggtgattggtttaataaccatcaataaagtgatcacgcagtgaagtaataaggtgcaaaagtaaatataagcatagaaaaatgagtggcgcgaatcctgttggctaattagaatcgccaaccatgaaaacagagactccatccgtaaaaattgttgctatcaccgctgacgaagcggggcaacgtatcgataactttttgcgtacccaattgaaaggcgtaccaaaaagtatgatttaccgtattttgcgtaaaggcgaagtgcgggtgaacaaaaaacgtattaagcctgaatataaactcgaagcgggtgatgaggtgcgtattccaccggttcgcgttgctgagcgggaagaagaggcggttagcccacatctgcaaaaggtggcggcgctggcggacgtcatcttatatgaagatgatcacatcctggtgctgaataaaccttccggtacggcggtacatggcggcagtggtttaagcttcggcgttattgaaggtttgcgggcgttgcgcccggaagcgcggttccttgaactggttcatcgtcttgaccgggacaccagtggtgttttgctggtagcgaaaaaacgcagcgcgttgcgttctctgcatgagcaattacgtgaaaaagggatgcaaaaagattacctggcgctggtgcgcggtcagtggcagagccatgtgaagagcgttcaagcaccgttactgaaaaatattctgcaaagcggcgaacgtatcgtgcgtgtgagtcaggaaggcaaaccgagcgaaacacgctttaaagtggaagaacgctatgcatttgccaccctggtgcgttgtagcccggtaacagggcgtactcaccagatccgtgtgcatacacaatatgcgggtcatccgattgcctttgacgatcgctacggtgaccgtgaatttgacaggcagctcactgaagcaggcacgggattaaatcgcctgttcctgcacgctgcagcgttgaagtttactcatccggggaccggtgaggtgatgcgtatcgaagctccgatggatgaaggtttgaagcgttgtttgcaaaagctgcgtaacgcgcgctaatacaagcatataaacctgataatgggcggttggcctgataaggcgtttacgccgcatcaggccgccagcaccgattgccggatgcgacgtaaccacatccggcgcaaaaaattatcccatcagcgggtttttcccttcccgacgtaacatctgacacagcgcgattagcggtaaaccaaccagcgtgttaggatcacgcccctctaaacgctcaaacagcgtaatgccaaatccttcactcttaaagctacccgcgcagtgcaggggatgctctttacgcacgtaattatcaatctccgcctcgctcaggtgacggaaatggacgtcaaaaggctccacttctgtttgcagatgcccattcgcgctattaaacaacgccagtccagtatagaaggtgacgatattgccgctggctttgcgtaattgcagacgggcattttcttccgttaacggtttaccggtgatttcgccatcaagaacacatacctggtcactaccaataattaaatgatccggataacgactcgccagagattgcgctttttcttgtgccagtcgaagcaccaactgtcgcggactttcgtcgctgcgtggggtttcgtcgacctctggtgctgcacattcaaaagagatttgcagtttttccagaagagcgcgacgccatgggctggtggaggctaaaataagtttaggcatatttttttccatcagatatagcgtattgatgatagccattttaaactatgcgcttcgttttgcaggttgatgtttgttatcagcactgaacgaaaataaagcagtaacccgcaatgtgtgcgaattattggcaaaaggcaaccacaggctgcctttttctttgactctatgacgttacaaagttaatatgcgcgccctatgcaaaaggtaaaattacccctgactctcgatccggttcgtacggctcaaaaacgccttgattaccagggtatctatacccctgatcaggttgagcgcgtcgccgaatccgtagtcagtgtggacagtgatgtggaatgctccatgagcttcgctatcgataaccaacgtctcgcagtgttaaacggcgatgcgaaggtgacggtaacgctcgagtgtcagcgttgcgggaagccgtttactcatcaggtctacacaacgtattgttttagtcctgtgcgtagtgacgaacaggctgaagcactgccggaagcgtatgaaccgattgaggttaacgaattcggtgaaatcgatctgcttgcaatggttgaagatgaaatcatcctcgccttgccggtagttccggtgcatgattctgaacactgtgaagtgtccgaagcggacatggtctttggtgaactgcctgaagaagcgcaaaagccaaacccatttgccgtattagccagcttaaagcgtaagtaattggtgctccccgttggatcggggataaaccgtaattgaggagtaaggtccatggccgtacaacagaataaaccaacccgttccaaacgtggcatgcgtcgttcccatgacgcgctgaccgcagtcaccagcctgtctgtagacaaaacttctggtgaaaaacacctgcgtcaccacatcactgccgacggttactaccgcggccgcaaggtcatcgctaagtaatcacgcatctgcgtgatgaagcttagtgaggattttccccaggcaactggggaaagaccaaaccgggcggcgacgataccttgacacgtctaaccctggcgttagatgtcatgggaggggattttggcccttccgtgacagtgcctgcagcattgcaggcactgaattctaatagccaactcactcttcttttagtcggcaattccgacgccatcacgccattacttgctaaagctgactttgaacaacgtagccgtctgcagattattcctgcgcagagtgttatcgccagtgatgcccggcctagccaagctatccgcgccagtcgtgggagtagtatgcgcgtggccctggagctggtgaaagaaggtcgagcgcaagcctgtgtcagtgccggtaataccggggcgctgatggggctggcaaaattattactcaagcccctggaggggattgagcgtccggcgctggtgacggtattaccacatcagcaaaagggcaaaacggtggtccttgacttaggggccaacgtcgattgtgacagcacaatgctggtgcaatttgccattatgggcagtgttctggctgaagaggtggtggaaattcccaatcctcgcgtggcgttgctcaatattggtgaagaagaagtaaagggtctcgacagtattcgggatgccagtgcggtgcttaaaacaatcccttctatcaattatatcggctatcttgaagccaatgagttgttaactggcaagacagatgtgctggtttgtgacggctttacaggaaatgtcacattaaagacgatggaaggtgttgtcaggatgttcctttctctgctgaaatctcagggtgaagggaaaaaacggagctggtggctactgttattaaagcgttggctacaaaagagcctgacgaggcgattcagtcacctcaaccccgaccagtataacggcgcctgtctgttaggattgcgcggcacggtgataaaaagtcatggtgcagccaatcagcgagcttttgcggtcgcgattgaacaggcagtgcaggcggtgcagcgacaagttcctcagcgaattgccgctcgcctggaatctgtatacccagctggttttgagctgctggacggtggcaaaagcggaactctgcggtaacaggacgctgccagcgaactcgcagtttgcaagtgacggtatataaccgaaaagtgactgagcgtacatgtatacgaagattattggtactggcagctatctgcccgaacaagtgcggacaaacgccgatttggaaaaaatggtggacacctctgacgagtggattgtcactcgtaccggtatccgcgaacgccacattgccgcgccaaacgaaaccgttagtaccatgggctttgaagcggcgacacgcgcaattgagatggcgggcattgagaaagaccagattggcctgatcgttgtggcaacgacttctgctacgcacgctttcccgagcgcagcttgtcagattcaaagcatgttgggcattaaaggttgcccggcatttgacgttgcagcagcctgcgcaggtttcacctatgcattaagcgtagccgatcaatacgtgaaatctggggcggtgaagtatgctctggtcgtcggttccgatgtactggcgcgcacctgcgatccaaccgatcgtgggactattattatttttggcgatggcgcgggcgctgcggtgctggctgcctctgaagagccgggaatcatttccacccatctgcatgccgacggtagttatggtgaattgctgacgctgccaaacgccgaccgcgtgaatccagagaatagtattcatctgacgatggcgggcaacgaagtcttcaaggttgcggtaacggaactggcgcacatcgttgatgagacgctggcggcgaataatcttgaccgttctcaactggactggctggttccgcatcaggctaacctgcgtattatcagtgcaacggcgaaaaaactcggtatgtctatggataatgtcgtggtgacgctggatcgccacggtaatacctctgcggcctctgtcccgtgcgcgctggatgaagctgtacgcgacgggcgcattaagccggggcagttggttctgcttgaagcctttggcggtggattcacctggggctccgcgctggttcgtttctaagataaggattaaaacatgacgcaatttgcatttgtgttccctggacagggttctcaaaccgttggaatgctggctgatatggcggcgagctatccaattgtcgaagaaacgtttgctgaagcttctgcggcgctgggctacgacctgtgggcgctgacccagcaggggccagctgaagaactgaataaaacctggcaaactcagcctgcgctgttgactgcatctgttgcgctgtatcgcgtatggcagcagcagggcggtaaagcaccggcaatgatggccggtcacagcctgggggaatactccgcgctggtttgcgctggtgtgattgatttcgctgatgcggtgcgtctggttgagatgcgcggcaagttcatgcaagaagccgtaccggaaggcacgggcgctatggcggcaatcatcggtctggatgatgcgtctattgcgaaagcgtgtgaagaagctgcagaaggtcaggtcgtttctccggtaaactttaactctccgggacaggtggttattgccggtcataaagaagcggttgagcgtgctggcgctgcctgtaaagcggcgggcgcaaaacgcgcgctgccgttaccagtgagcgtaccgtctcactgtgcgctgatgaaaccagcagccgacaaactggcagtagaattagcgaaaatcacctttaacgcaccaacagttcctgttgtgaataacgttgatgtgaaatgcgaaaccaatggtgatgccatccgtgacgcactggtacgtcagttgtataacccggttcagtggacgaagtctgttgagtacatggcagcgcaaggcgtagaacatctctatgaagtcggcccgggcaaagtgcttactggcctgacgaaacgcattgtcgacaccctgaccgccagcgcgctgaacgaacctagtgcgatggcagcggcgctcgagctttaaaagaggaaaatcatgaattttgaaggaaaaatcgcactggtaaccggtgcaagccgcggaattggccgcgcaattgctgaaacgctcgcagcccgtggcgcgaaagttattggcactgcgaccagtgaaaatggcgctcaggcgatcagtgattatttaggtgccaacggcaaaggtctgatgttgaatgtgaccgacccggcatctatcgaatctgttctggaaaaaattcgcgcagaatttggtgaagtggatatcctggtcaataatgccggtatcactcgtgataacctgttaatgcgaatgaaagatgaagagtggaacgatattatcgaaaccaaccttagttctgttttccgtctgagtaaagcggtaatgcgcgctatgatgaaaaagcgtcatggtcgtattatcactatcggttctgtggttggtaccatgggaaatggcggtcaggccaactacgctgcggcgaaagcgggcttgatcggcttcagtaaaagtctggcgcgcgaagttgcgagtcgcggtattactgtaaacgttgttgctccgggctttattgaaacggacatgacacgtgcgctgagcgatgaccagcgtgcgggtatcctggcgcaggttcctgcgggtcgcctcggcggcgcacaggaaatcgccaacgcggttgcattcctggcatccgacgaagcagcttacatcacgggtgaaactttgcatgtgaacggcgggatgtacatggtctgaccgcgatttgcacaaaatgctcatgttgcgcgcagtctgcgtggttatgagtaataattagtgcaaaatgatttgcgttattggggggtaaggcctcaaaataacgtaaaatcgtggtaagacctgccgggatttagttgcaaatttttcaacattttatacactacgaaaaccatcgcgaaagcgagttttgataggaaatttaagagtatgagcactatcgaagaacgcgttaagaaaattatcggcgaacagctgggcgttaagcaggaagaagttaccaacaatgcttctttcgttgaagacctgggcgcggattctcttgacaccgttgagctggtaatggctctggaagaagagtttgatactgagattccggacgaagaagctgagaaaatcaccaccgttcaggctgccattgattacatcaacggccaccaggcgtaagtgaacatctccaggcggtcgttcgaccgcctgagttttatctttttgtcccactagaatcattttttccctccctggaggacaaacgtgtctaagcgtcgtgtagttgtgaccggactgggcatgttgtctcctgtcggcaataccgtagagtctacctggaaagctctgcttgccggtcagagtggcatcagcctaatcgaccatttcgatactagcgcctatgcaacgaaatttgctggcttagtaaaggattttaactgtgaggacattatcagccgcaaagaacagcgcaagatggatgccttcattcaatatggaattgtcgctggcgttcaggccatgcaggattctggccttgaaataacggaagagaacgcaacccgcattggtgccgcaattggctccgggattggcggcctcggactgatcgaagaaaaccacacatctctgatgaacggtggtccacgtaagatcagtccattcttcgttccgagtacgattgtgaacatggtggcaggtcatctgactatcatgtatggcctgcgtggcccgagcatctctatcgcgactgcctgtacttccggcgtgcacaacattggccatgctgcgcgtattatcgcgtatggcgatgctgacgtgatggttgcaggtggcgcagagaaagccagtacgccgctgggcgttggtggttttggcgcggcacgtgcattatctacccgcaatgataacccgcaagcggcgagccgcccgtgggataaagagcgtgatggtttcgtactgggcgatggtgccggtatgctggtacttgaagagtacgaacacgcgaaaaaacgcggtgcgaaaatttacgctgaactcgtcggctttggtatgagcagcgatgcttatcatatgacgagtccgccagaaaatggcgcaggcgcagctctggcgatggcaaatgctctgcgtgatgcaggcattgaagcgagtcagattggctacgttaacgcgcacggtacttctacgccggctggcgataaagctgaagcgcaggcggtgaaaaccatcttcggtgaagctgcaagccgtgtgttggtaagctccacgaaatctatgaccggtcacctgttaggtgcggcgggtgcagtagaatctatctactccatcctggcgctgcgcgatcaggctgttccgccaaccatcaacctggataacccggatgaaggttgcgatctggatttcgtaccgcacgaagcgcgtcaggttagcggaatggaatacactctgtgtaactccttcggcttcggtggcactaatggttctttgatctttaaaaagatctaagttgtcattttccacccttataaaaggtccgcttgcgggccttttttcttagcttttattccgacttgttccgtagtgaacatgctgccacactaacaattctctgataaggagccggtatgttcttaattaacggtcataagcaggaaagcctggcagtaagcgatcgggcaacgcagtttggtgatggttgttttaccaccgccagagttatcgacggtaaagtcagtttgttaagcgcgcatatccagcgactacaggatgcttgtcagcggttgatgatttcctgtgacttctggcctcagcttgaacaagagatgaaaacgctggcagcagaacagcaaaatggtgtgctgaaagtcgtgatcagtcgcggtagtggcgggcgagggtacagcacattgaacagcggaccggcaacgcggattctctccgttacggcttatcctgcacattacgaccgtttgcgtaacgaggggattacgttggcgctaagcccggtgcggctggggcgcaatcctcatcttgcaggtattaaacatctcaatcgtcttgagcaagtattgattcgctctcatcttgagcagacaaacgctgatgaggcgctggtccttgacagcgaagggtgggttacggaatgctgtgcggctaatttgttctggcggaagggcaacgtagtttatacgccgcgactggatcaggcaggtgttaacggcattatgcgacaattctgtatccgtttgctggcacaatcctcttatcagcttgtcgaagtgcaagcctctctggaagagagcttgcaggcagatgagatggttatttgtaatgcgttaatgccagtgatgcccgtatgtgcctgtggcgatgtctcctttagcagtgcaacgttatatgaatatttagccccactttgtgagcgcccgaattaatcatgaaaaaagtgttattgataatcttgttattgctggtggtactgggtatcgccgctggtgtgggcgtctggaaggttcgccatcttgccgacagcaaattgcttatcaaagaagagacgatatttaccctgaagccagggaccggacgtctggcgctcggtgaacagctttatgccgataagatcatcaatcgtccacgggtttttcaatggctgctgcgtatcgaaccggatctttctcactttaaagccgggacttaccgctttacaccgcagatgaccgtgcgcgagatgctgaaattgctggaaagcggtaaagaagcacagttccctctgcgactggtagaagggatgcgtctgagcgattacctcaagcaattgcgtgaggccccgtatatcaagcatacgctgagcgatgataagtacgccaccgtagcgcaggcacttgaactggaaaacccggagtggattgaaggttggttctggccagacacctggatgtataccgccaataccaccgatgtcgcgttactcaagcgagcgcacaagaaaatggtgaaagcggtcgatagcgcctgggaagggcgtgcggacggtctgccttataaagataaaaaccagttggtgacgatggcaagtattatcgaaaaagaaaccgccgttgccagtgaacgcgataaggttgccagtgtatttatcaaccgtttacgcattggtatgcgcctgcagaccgacccgaccgtgatttacgggatgggagagcgttataatggcaaactttctcgtgcagacctggaaacgccgacagcgtataacacctataccattaccggtctgccgccaggtgcgatagcgacgccgggggcggatagcctgaaggctgctgcgcatccggcaaaaacgccgtatctctattttgtggccgatggtaaaggtggtcacacgtttaataccaatcttgccagtcataacaagtctgtgcaggattatctgaaagtgcttaaggaaaaaaatgcgcagtaagtatatcgtcattgaggggctggaaggcgcaggcaaaactaccgcgcgtaatgtggtggttgagacgctcgagcaactgggtatccgcgacatggttttcactcgggaacctggcggtacgcaacttgccgaaaagttaagaagcctggtgctggatatcaaaagcgtaggcgatgaagtcattaccgataaagccgaagttctgatgttttatgccgcgcgcgttcaactggtagaaacggtcatcaaaccagctctggctaacggcacctgggtgattggcgatcgccacgatctctccactcaggcgtatcagggcggcggacgtggtattgaccaacatatgctggcaacactgcgtgatgctgttctcggggattttcgccccgacttaacgctctatctcgatgttaccccggaagttggcttaaaacgcgcgcgtgcgcgcggcgagctggatcgtattgagcaagaatctttcgatttctttaatcgcacccgcgcccgctatctggaactggcagcacaagataaaagcattcataccattgatgccacccagccgctggaggccgtgatggatgcaatccgcactaccgtgacccactgggtgaaggagttggacgcatgagatggtatccatggttacgacctgatttcgaaaaactggtagccagctatcaggccggaagaggtcaccatgcgctactcattcaggcgttaccgggcatgggcgatgatgctttaatctacgccctgagccgttatttactctgccaacaaccgcagggccacaaaagttgcggtcactgtcgtggatgtcagttgatgcaggctggcacgcatcccgattactacaccctggctcccgaaaaaggaaaaaatacgctgggcgttgatgcggtacgtgaggtcaccgaaaagctgaatgagcacgcacgcttaggtggtgcgaaagtcgtttgggtaaccgatgctgccttactaaccgacgccgcggctaacgcattgctgaaaacgcttgaagagccaccagcagaaacttggtttttcctggctacccgcgagcctgaacgtttactggcaacattacgtagtcgttgtcggttacattaccttgcgccgccgccggaacagtacgccgtgacctggcttagtcgcgaagtgacaatgagtcaggatgcattacttgccgcattgcgcttaagcgccggtagccctggcgcggcactggcgttgtttcagggagataactggcaggctcgtgaaacattgtgtcaggcgttggcatatagcgtgccaagcggcgactggtatagcctgctagcggcccttaatcatgaacaagctccggcgcgtttacactggctggcaacgttgctgatggatgcgctaaaacgccatcatggtgctgcgcaggtgaccaatgttgatgtgccgggcctggtcgccgaactggcaaaccatctttctcccagccgcctgcaggctatactgggggatgtttgccacattcgtgaacagttaatgtctgttacaggcatcaaccgcgagcttctcatcaccgatcttttactgcgtattgagcattacctgcaaccgggcgttgtgctaccggttcctcatctttaagagagacatcatgtttttagtcgacagtcactgccatctcgatggtctggattatgaatctttgcataaggacgtggatgacgttctggcgaaagccgccgcacgcgatgtgaaattttgtctggcagtcgccacaacattaccgggttatttacatatgcgggatctggtaggcgaacgtgacaacgtcgtattttcttgtggcgtgcatccactcaaccagaatgatccctacgatgtagaagatttacgccgtctggcggcagaagagggtgttgtagcgctgggtgaaaccgggctggattattattacacgccggaaactaaagtacgtcagcaagagtccttcatccatcatatccagattggtcgtgaactgaacaagccggttatcgtccatacccgtgacgcccgtgccgatacgctggcaattctgcgcgaagaaaaagtgacggattgcggtggcgtactacactgttttacagaggacagagaaacggcgggtaaattactggatctcggattttacatctccttttccggcattgtgaccttccgtaatgcggagcaactgcgcgatgctgcgcgttatgtccccctggatcggttactggtggaaactgacagtccttaccttgcgccggtaccgcatcgaggaaaagagaatcaacctgcgatggttcgtgacgttgcagaatacatggctgtgttgaaaggtgttgccgttgaagaactggcgcaggtaaccaccgataacttcgcccgtctgtttcacatcgacgcttcccgccttcaatccatccgttgaatgagtttttttaaagctcgtaattaatggctaaaacgagtaaagttcaccgccgaaaattgggcggtgaataaccacgtttgaaatattgtgacatatgttttgtcaaaatgtgcaacttctccaatgatctgaagttgaaacgtgatagccgtcaaacaaattggcactgaattattttactctgtgtaataaataaagggcgcttagatgccctgtacacggcgaggctctccccccttgccacgcgtgagaacgtaaaaaaagcacccatactcaggagcactctcaattatgtttaagaatgcatttgctaacctgcaaaaggtcggtaaaagcctgatgctgccggtatccgtactgcctatcgcaggtattctgctgggcgtcggttccgcgaatttcagctggctgcccgccgttgtaagccatgttatggcagaagcaggcggttccgtctttgcaaacatgccactgatttttgcgatcggtgtcgccctcggctttaccaataacgatggcgtatccgcgctggccgcagttgttgcctatggcatcatggttaaaaccatggccgtggttgcgccactggtactgcatttacctgctgaagaaatcgcctctaaacacctggcggatactggcgtactcggagggattatctccggtgcgatcgcagcgtacatgtttaaccgtttctaccgtattaagctgcctgagtatcttggcttctttgccggtaaacgctttgtgccgatcatttctggcctggctgccatctttactggcgttgtgctgtccttcatttggccgccgattggttctgcaatccagaccttctctcagtgggctgcttaccagaacccggtagttgcgtttggcatttacggtttcatcgaacgttgcctggtaccgtttggtctgcaccacatctggaacgtacctttccagatgcagattggtgaatacaccaacgcagcaggtcaggttttccacggcgacattccgcgttatatggcgggtgacccgactgcgggtaaactgtctggtggcttcctgttcaaaatgtacggtctgccagctgccgcaattgctatctggcactctgctaaaccagaaaaccgcgcgaaagtgggcggtattatgatctccgcggcgctgaccagcttcctgaccggtatcaccgagccgatcgagttctccttcatgttcgttgcgccgatcctgtacatcatccacgcgattctggcaggcctggcattcccaatctgtattcttctggggatgcgtgacggtacgagcttcagccacggtctgatcgacttcatcgttctgtctggtaacagcagcaaactgtggctgttcccgatcgtcggtatcggttatgcgattgtttactacaccatcttccgcgtgctgattaaagcactggatctgaaaacgccgggtcgtgaagacgcgactgaagatgcaaaagcgacaggtaccagcgaaatggcaccggctctggttgctgcatttggtggtaaagaaaacattactaacctcgacgcatgtattacccgtctgcgcgtcagcgttgctgatgtgtctaaagtggatcaggccggcctgaagaaactgggcgcagcgggcgtagtggttgctggttctggtgttcaggcgattttcggtactaaatccgataacctgaaaaccgagatggatgagtacatccgtaaccactaatccgtaagacgttggggagactaaggcagccagatggctgccttttttacaggtgttattcagaattgatacgtgccggtaatgctgaaattacgcggtgtgccgtagacgatagaaccttccacgttggtatcgtaggttttgtcgaacaggttattgacgttcccctgtaagctgaagtttttcgtcacctggtagcgggtgaagagatccaccagcgcgtagctaccttgctcggcgcggaaggtgccatacggcgtcacggtgtcggtatacacgcgattttgccagttaacaccaccgccgaccgtcaactctggcatgacaggcaaccgatagctggtgaacattttaaccgtggtgcgtggcagattaggattaacggcgtttccttcgttatcctctgcaatatagcgcgttgcgccaaatgtcagctgccagttgtcggtaattgcgccgttgagttcaaattccacccctttactgactgtcccatccaccgctttataggcggtttcgccgttgctgccggggataggtgtaccggtggactgagcgacattatcctgctcaatacggaagatggctaacgtggtggtcagacggctattcatccagtcgcttttcagacccagctcgtagttgttaccggtgattggagccagatatttgccactactgtcacgatcattttgcggctggaaaatagaggtatagctggcgtaggtgctccagttgtcattgatgtcaaacaccagaccagcgtaaggcgtggtgtggtttttctccatgctgtaagtcagcgtatcaacccgccagttggtataacgtgcgccgaggatcagatgcagcggatcggcaagggtgacacgagtggcagcatataagcttttcatatgtgtggtatcgtcctgcgccaggctctgtggactccagtcggtttgtgggaaattgccattaaagttgtagaaactgccaatttcatccgggaagatgttggcccaactactgaagtaacgattgttttgtttgctgtaactgccaccaaacattagattgtgctgacgaccaaacaattcataactaccgtcagcgaacaaatccagcgcatcaactttacgtttgccactgttccaaccggtgccgccgacataatcaaagccaggtccataattactgtatggcccaaccagcataccatccgctttgtttacataggcatcgacatacatcattttgctgtcaaattcgacttcagagtgggtggcattcagtgtcgcttgccaggtatcagcaaactgctgcttcagggtcataaagaccttgttgatctctttatcgttgtacgcccagtcaggtgcggtactgcgtgcgcgatcgtaactgttgctgctgccatcagtattccagcgcggtaaaccgccccaggtagggctattaacatcaatgcgctgatattcgtaaccggcactaagcgtcgtaagatcgcctaaatcagcatcgacaatgccgctgaagaaggtcttttcactgttgtagcggtccagccaactgtcgttattctggtagccgccgacaattcgcgcgcggattttaccgtcttcggtgagtgggctttgtaaatccgccacataccgttctttgttccagctaccgtattccgcgctgacatcgcctttaaattcacgactggtcgcgtgttttcgaaccatattaattgccgcagatggattacccgtcccggtcatgagtcctgtcgcgccacgcactacttctacgcgttcaaagagtgccatatcagaaagtgcgtcgcccagattccagcggctttcaaaataggtggggataccatcaaccatatagttatcgatctggaatccgcgggaataataaagagcacgatcggaatccgcctgacttttgctgatccccagcgtgttttccatcacttcgcccagcgtttgtaactgctgatcttccatccgctgctggctaacaatagtgacgctctgaggaatatcacgttgagtcatctgcattttggtacccgcagaggtagacgttacgctgtaatcattttcgccatcatctggagctgtggcactaccctcaacaatcaccgtttcttcagtggctggtgcagcaaaagcggcagaaggtaatagtgccagtgctatgcaaccggcaagtagactcggtttggtgatggcttgatattgattatccctgttaaattgtgtactaagcatttgaaatctcttggtttatgttgtcgtcaggctcatgccggaggagggtgatgagcgattatatttagtgtgcgaataattttgtttgtaaatgcaaatgagaaatatacgcattcatatttgtcatgtaaaccaaacagagaatgtcttttcagcgcattcgcaggcagaaatgggaataatggcgatatatacggcagcaaaacgattttttgcttaagaaatcgtgagttaaggttgaaagagcaggtttaactcgaccatactctatactcgcagtgtggcgcggcgtagcatggcgcaacgcatggctatttgaaaaaggaaaatgtcgtggcagaagaaactatattcagcaaaattattcgtcgtgagatcccctccgatatcgtctaccaggatgatctggtaacggcgtttcgcgatattagcccgcaagcgccaacgcatattctgatcattccgaatatcctcattccgactgtgaacgacgtcagtgctgagcatgagcaggcgctgggacgcatgatcaccgtagcggcaaaaattgctgagcaagaaggtattgccgaagatggctatcgtctgatcatgaataccaaccgccatggcggacaagaggtttaccacatccatatgcacttgttgggtggccgtccgctgggaccaatgctggcgcataaaggtctgtaacgatgagaaaaggatgctttgggctggtgtctctggtgttgttactgctggtgggctgtcgtagtcatccggaaattccggtgaatgatgagcaaagcctggtgatggagagttctttattggctgcgggcatcagtgcagaaaagcccttccttagcacgtctgatattcaacctagtgcatccagtacgctttataacgaaaggcaagaacccgttaccgttcattatcgtttttactggtatgacgccagagggctggagatgcatcctctggaaaggccacgcagcgttaccattcccgcacatagcgcggtaacgctgtacggcagcgccaattttctgggggcgcacaaagtcagactttatctatatttgtaaggggtgaatcttgatgacaaaaatgagtcgctacgccttgattaccgcgctggcgatgtttctcgccgggtgtgtggggcaacgtgaacctgcaccggtagaagaagtgaaaccagcgccggaacaaccagccgagccacaacagcctgtccccacagtgcccagcgtgccgacgatcccgcagcagccaggcccaattgagcacgaagatcaaactgcaccgcctgcgccgcatattcgccattatgactggaatggcacaatgcagccgatggtcagtaagatgcttggggctgacggggtgactgcgggtagcgtcctgctggttgatagcgttaacaaccgtactaacggtagcctgaatgccgcagaagcgaccgaaacgctgcgaaatgcgctggctaataacgggaaatttaccctggtttccgcccagcaactgagcatggcgaagcaacagttaggtttgagcccgcaggacagtttaggcacccgtagtaaagccataggcattgcccgcaatgtcggcgctcattacgtgctgtactccagcgcctctggcaacgttaacgctccgaccctacaaatgcagctgatgctggtgcagacgggcgaaattatctggagtggtaaaggtgccgttagccagcaataagtaaaattatctggtcaggtaaaggtgccgtttcgcagcaataatcccatcacgcgcgacgaattgctgagccgctttttcccgcagtatcatcccgtcacgacgtttaatagtgggcttagtggcgggagttttctcattgaacatcagggccagcgttttgttgtgcgtcagccgcacgatcctgatgcgccgcagtccgcgttcttgcgccagtatcgggctttaagtcaactacccgcatgcattgcaccgaagccgcatttatatctccgtgactggatggtagtcgactatctgcccggcgcggtaaaaacgtatttgccggataccaacgaactggcaggcttgctgtattatctacatcaacaaccacgttttggctggcgaataacgctgttgccgttactggaactgtactggcagcaaagcgatccggcgcggcggacagtgggttggctgcgaatgttaaaacgtctgcgcaaagcgcgggaaccacggcctttacgcttaagtccattgcatatggatgtccacgccggaaatttagtgcatagcgcgagtgggttaaaactcatcgactgggagtatgccggagatggtgatatcgcgctggaactggcggcggtgtgggtggaaaatactgaacagcaccggcaattggtcaatgactatgccactcgcgcgaagatttatccggcgcaattatggcgtcaggtcaggcgatggtttccctggctgctgatgctcaaagcagggtggtttgagtaccgctggcgacaaaccggcgatcaacaatttatcaggctggccgatgacacctggcggcagctattaataaaacaataaggagagcagtgtgggtccagtaatgttggatgtcgaaggttacgaactggacgcggaagagcgtgaaatactggcgcatccgctggtgggagggctgattctctttacgcgtaactatcatgatcctgcccagttacgtgaactggtgcgccagatccgcgcagctagccgcaatcgtctggtggtggcggttgatcaggaaggtggacgcgtgcagcgttttcgtgaaggttttacccgcttgccagcggcgcaaagtttcgctgcgctgagtggaatggaagagggtggcaaactggcgcaggaggcaggttggttgatggccagcgaaatgatcgctatggatattgatatcagctttgcgcctgtgctggatgtcgggcatatcagcgcggcgattggcgagcgttcttatcatgccgatccacaaaaagccctggcaattgccagccggtttattgatggtatgcatgaagccggaatgaaaacgaccgggaaacacttcccaggacacggtgcagtaacggcagacagtcacaaagaaacaccgtgcgatccacgtccacaagcggagattcgcgctaaagatatgagcgtcttcagttccttaatccgcgaaaataaactcgacgccattatgcctgcgcatgtgatctacagtgatgttgatccgcgtccggcgagcggttctccctactggctgaaaaccgttttgcgtcaggaactgggttttgacggcgtgattttctctgacgatttaagcatggaaggtgccgcgattatgggcagttatgccgaacgcgggcaggctagtctggatgcgggttgcgatatgatcctggtctgcaataatcgtaaaggggccgtcagcgtgttagataatctgagtccgatcaaggcagaacgtgttacacgtttgtatcataaaggtagttttagccgacaggaactgatggacagcgctcgctggaaagcgatcagcacccgtctgaatcagttacatgaacgctggcaggaagagaaagcaggtcactaaccctggcttatgtgaggaagcgatgattatctatttacacggttttgactctaacagtccgggtaaccacgagaaagtcttacaattgcagtttattgacccggatgtacgcttgataagctacagtacgcggcatccgaaacatgatatgcagcatctgcttaaagaagtggacaaaatgttgcaactgaacgttgacgagcgtccgctaatttgcggcgttggcttgggcggatactgggcggaacggattggttttctttgcgacatccgccaggtgatcttcaaccctaatttgttcccttatgagaacatggaaggcaagattgatcgcccggaagagtatgccgatattgccactaagtgtgtgaccaacttccgtgagaagaatcgcgatcgttgcctggtgattttgagccgtaatgatgaagcgcttaacagccagcggacatctgaagagttgcatcattattacgagattgtctgggacgaagagcagacgcacaaattcaagaatatctccccgcatttacagcgcattaaagcgttcaaaaccctcgggtaaatgccctcgtcgcatcaggtaaccttgccggtacctgatgcgctccgaattctgtgggtcggataaggcgtccacgccgcatccgacagtcgagcatcaatgcctgatgcgcttcttatcaggcctaccgaacgccctgcatacacccctcactctatatcactctcacaaattcgctcaaataataaacaataaactctgttttttgatctcacccggtaaagtcgcctatcttttcagcaacaaaacttgattaacatcaattttggtatgaccaatgcaccattcatgttattctcaatagcgaagaacattttcattgctgtaacctgttgttaattaagagctatgttaataaccattaattaacaattggttaataaatttaagggggtcacgttgactacgccattgaaaaagattgtgattgtcggcggcggtgctggtgggctggaaatggcaacacagctggggcataagctgggacgcaagaaaaaagccaaaattacgctggtcgatcgtaaccacagccacctgtggaaaccgctgctgcacgaagtggcgactggcagccttgatgaaggcgtcgatgcgttgagctatctggcccatgcgcgcaatcatggtttccagttccagctgggttccgtcattgatattgatcgtgaagcgaaaacaatcactattgcagaactgcgcgacgagaaaggtgaactgctggttccggaacgtaaaatcgcctatgacaccctggtaatggcgctgggtagcacctctaacgatttcaatacgccaggtgtcaaagagaactgcattttcctcgataacccgcaccaggcgcgtcgcttccaccaggagatgctgaatttgttcctgaaatactccgccaacctgggcgcgaatggcaaagtgaacattgcgattgtcggcggcggcgcgacgggtgtagaactctccgctgaattgcacaacgcggtcaagcaactgcacagctacggttacaaaggcctgaccaacgaagccctgaacgtaacgctggtagaagcgggagaacgtattttgcctgcgttaccgccacgtatctctgctgcggcccacaacgagctaacgaaacttggcgttcgcgtgctgacgcaaaccatggtcaccagtgctgatgaaggcggcctgcacactaaagatggcgaatatattgaggctgatctgatggtatgggcagccgggatcaaagcgccagacttcctgaaagatatcggtggtcttgaaactaaccgtatcaaccagctggtggtggaaccgacgctgcaaaccacccgcgatccagacatttacgctattggcgactgcgcgagttgcccgcgtccggaagggggctttgttccgccgcgtgctcaggctgcacaccagatggcgacttgcgcaatgaacaacattctggcgcagatgaacggtaagccgctgaaaaattatcagtataaagatcatggtagcctggtaagcctgagcaacttctccaccgtcggtagcctgatgggtaacctgacgcgcggcagtatgatgattgaaggacgaattgcgcgctttgtatatatcagcctataccgaatgcatcagattgcgctgcatggttactttaaaaccggattaatgatgctggtggggagtattaaccgcgttatccgtccgcgtttgaagttgcattaatcgacgtacactggcggatgtggcataaacgcctcatccgcccttgaggaacagcgcgatcggcagccgcgttgtatcaggcatcctttcagactcctccgaatccttaagtatttccagccattcccgcgcttttcatcttctgtctgatagctgcttttctccttcgcttgcatgattggcataactgcaaagaaggaggtgttcccgtaaataaaagtatgttggcgggtatcgggattggtgtcgcagctgcgctgggcgtagcggcagtggccagtctgaacgtgtttgaacggggcccgcaatacgctcaggttgtttctgcaaccccaatcaaggaaacggttaaaacaccgcgtcaggagtgtcgcaacgtcacagtgacccatcgtcgaccggtgcaggatgaaaatcgcattaccgggagcgtgctcggcgctgttgctggcggcgtgatagggcatcagtttggtggtggtcgcggtaaagatgtcgccactgttgtgggggcgctgggtggtggatatgccggtaaccagatccagggctctctccaggaaagcgatacttacacgactacgcaacagcgttgtaaaacggtgtatgacaagagtgaaaaaatgctcggttatgatgtgacctataagattggcgatcagcagggcaaaatccgcatggaccgcgatccgggtacgcagatcccgctagatagcaacgggcaactgattttgaataacaaagtataacaaggctgtactctgcaatttggcccctcattcgctcaggctgaggggctttttttgcgacttatttcaccagttcgggccataaacgcaaagtcgttccggcaatctgcatcagtttttccaggcttgcaccttcgcgtgcgctgatgctcatcccctgaataatacaattaaggaattctgccagatgtgtcacgtcacagtggggcgggatttccccgcgcgcttgtcgttgacataaaaactgctgcaaagtgcgctcttgcatcgcatggcgacttttcaacgtattggcgatatctccactatctggggagagggtggtgcagttgttgatcatgaagcagcctgccggggtgtctttgctggtaaagcagttggcgatggcagcaaaatagtcagccagcgcagactccacgcttttctcttcacaaaacagctgtgcttcatgcttagcggcaaaacgatcgatatagcggtcgagaacggcacgaaataacccctctttgttggtaaattccgcgtatagcgtgggcgctttggctccggtcgcttcgacgaggtccgcaagagaagtcgcttcataaccgtgttgccagaacaatttcatggccttatcaagcgcggcatccctgtcgaacacttttgggcggccacggcttttttttacacattgtgtactgtcagttgccatgatgccgttgtacctggtgactgtgaatgaaaggttattataaaaataatcacctccgttcaccagtccagatcccataaaaataattgctttctatttaactgaaatttaaagatttttaaattaattaatgattgttataaaaaatatcttgtatgtgatccagatcacatctatcatttagttatcgatcgttaagtaattgcttgcgacgtcattcatctgcataaggccactattatgaaaaacgtaaaaaccctcatcgctgcggcgattttaagctccatgagttttgccagctttgcggctgtcgaagttcagagtacgccagaaggccaacaaaaagtcggtacaatcagtgctaacgcggggacaaatctgggaagcctggaagagcagctggcgcaaaaagcggatgagatgggcgcaaaatctttccgtattacttctgtaaccggtccgaataccctccatggaacagcagtaatttataaataagcattaaccctcattaatgcctgctactgctgattttttccccgcgacatgccgtgtcgcggggatttttttatccgggctttacagcgtttgtgggctcacttgatgacggcggacatccaccggcatcccggaacggacatccatcacatgttgcatcacttcagcgtcagtttgtgctgcatctttaaaactttgcattgcgctattcagcgtaattggcagcagctgcggatcgtcatcaatcttctcactcagcggctgatgtacttcaaccagacgcgcaccgtttggttcggcagagacttttatcggagtgttgatgatattcactttggtgcctggggtgacctggctaaagagtgttttgatatcgtcatcccgcagacgaatacagccagaacttacccgcatgccaatgccgaaatcggcgttcgtaccatgaagcaaataaacgccgccataggccgccagacgaatcgcatgatggcccattgggttatccagtccagccggcactaccgcaggcaactcaattccctgtgctttataacgggcgcggatgtttgccgttggcgtccaggttgggtttgcacgtttgtcactaacggtggtcaccattgtcggtgtcagcgtgtcaccacctaactgaccaatacctattggatacacggttacgctatttttacccggcgggtagtaatagagacgcagctccgcaatgttgatcacaatgccttcgcgcggcgcatctggaagtagggtttgcaacgggatcgttaacacgctgcccgcgcgcggtacgtaaggatcaacgccggggttagcctgtaacagagcgagaaagccgacgttgtattttttggcgatggcttccagagaaccaccgtcattttccaccacatgaaatttgttttcgccaaccagacgactgcccgctggcggcagcggccaggtgttggcttttgccggtagcgccagcgccacggcagcggcgaacgtaaaaaacgttagccagcgagaaaaacgcgttttgatcatcaccaaaaatccataataaatataaggttattgtaataaacagataagcctgaattatggatggtgacagtgtcggatagtgcagggaagtgcaaagaatttgtaaatgttgcagatgggggcgcagaaacgcccccgatttaccattaagcgatcgcgttctcttccagttcacgcataaactggcgtacccattcgatacgcgttttccgctcactcaaatcctgaataaatttcaggcgcgtcggaccatcaaggcggtaatgctgcggctgtttttgcagcaaaccaatcaaccaggccggattaacgtgattcttctcggcaaattcgatcaccccgcctttctcattaccttccagcttcctgatccccagtttctgcgcttgctggcgcagacgggcaatatccagcagggtacgcgccggatctggcagcaggccgaagcgatcgataagctcgactttgatctcttccagttcgttttccgttttggcgctggcaatacgtttgtagaagctcagacgcgtgttcacgtcagggatgaaatcatctggcaataggctcggcatccgcagctcgacttctgtttgctggctggtgagatcttccaggctcggctcgcgtccggctttcagtgcatcgacggcgttttccagcaactccatatacaggctgaaaccgatggtttccatactgccgctttgttcttcgccaagcagttcacccgcgccgcgaatctccagatcgtgcgttgccagcgcaaaacctgccccgagatcttccaggctggcaattgcttcaagacgtttttgtgcatcggtagtcatcgcttttggatgcggtgtcagcaaccatgcatatgcctgatgatggctacgtccgacgcgaccgcgtaactggtgcagctgcgccagaccgaagtgatccgcgcgttcaatgataatagtgttggctgtcgggatgtcgatcccggtttcgataatggttgtacaaaccagcacgttgaaacgttgatgatggaaatcattcatcacccgttccagttcgcgctcgcgcatctgcccgtgaccgatggcgatccgcgcttctggcaccagttctgccagccgttcggcggctttctgaatgttttccacatcattgtagagataataaacctgtcctccgcgcaaaatttcacgcaggatcgcctcccggaccaccatgctgtcatactcacggacaaaggttttaactgccagacgacgggcgggcggcgtggcgataatgctcaggtcacgcattccgctcattgccatattcagcgtacgtgggatcggcgttgcagtaagcgtcagaatatccacgttcgcgcgcatcgctttaatgcgctctttatgacgcaccccgaagcggtgttcttcatcgacaatcagcaggcctaaatctttaaacttgacgtcactttgcagcagtttgtgcgtaccgatcagaatatcgattttcccttccgccacttccgcaaggatttgcgtctgctctttggcgctgcggaaacgggagatcatttcgatacgtaccggccagttggcgaaacggtcgcggaagttgtcgtaatgctgctgcgcgagaagggtggtaggcaccagcaccgccacctgcttgtggttatctactgccaggaaagctgcgcgcatcgccacttctgttttaccaaagccaacatcgccgcacaccagacgatccattgccagcggctgacacatgtcgctaagtaccgcattaatggcctgcgcctgatccggcgtggtttcaaacgggaagctgtcgcagaacaactgatactgctcacgatcgtgtttaaacgcgaagccctctttggcggcgcgttgcgcgtagatatccagcaattccgccgccacatcacgcactttttccgccgctttctgccgcgcgcgactccacgcatcgccgccaagtttatgcagcggggcgttttcttccgcgccacctgcgtaacggctaatcagatgcagactgctcaccggaacatacagtttggcgtcgttggcataggtgagcatcagatactcgccagtaatgccacccgcttccagcgtggtcattccggcataacgaccgacgccgtgctccagatggaccaccggctgaccaatatgcagttccgcaaggttacggatcagtgtatcggggttgatggtgcggcgagaatcctgacgacgacgggcaacgcgttcaccgagcagatcgctttcgcaaatcagcgccagattacgcaccgtatcgacaaaaccatgttcggcagcgccaatcatcagataacgcccacggtcgctggcttcatcaagacgcataatgcgttgcggagcaattttaattcgtgcgagcagttcacccagcgcttcacggcgaccttcactttctacgctgaacaccaccggaccgtcgaaagtctcgaggaacttacgcagcgcatccagcggcgctttttgttgtgcctgaacggccaggtctggcagtttctggaaacctaaattggcattcgcggcttttgtcggtaaatgttcagtttttagctgcacccggggccagtttttcagctcactgaagagctcgtccacccgcagccagaggctttgtggtggcaacagcgggcgcatcggatcgacgccgcgattctcaaaacgcgccagcgtgtcagcctggaaacgttcggcactggtttccagatcgccagtattcacgagcaaggtattggcagggaaataactgaacagcggcggcagtggttcgctgaagaacaatggctgccagtactcgatcccggcaggtaatgtgcctttactcacttgctggtaaatatgttctggatcgcgcttcacttcgaaggtatcgcgccactggctgcggaacagttcaattgccgctttatcggtcggaaattcgtgcgcgggcagcagattgatcgcttctacttcctccagcgtgcgctggctgtcgacgtcaaacacccgcaggctgtcgatttcatcatcaaagaaatcaagacgataaggcagctcactccccatcgggaagagatccagcaacgcgccgcgcgtggcgtattcgccgtgctccatcacctggtcaacatggcgataaccggcgctgtccagttgggttcgtaatgcatctcgactcaggcgctgaccttttttcatcaccagcgcatgaccgtggagaaaactgtgtgggcaaacgcgctgcataagcgtattcaccggaacaatcagtacgccacgctgcatcgtcggtagctggtaaagggtggaaaggcggctggagataatgtcctgatgagggctaaaactgtcgtagggaagagtttcccagtccgccagattcatcaccatttgatcggtaaactggctgatttcatcatgcaaacgcagagcattttgcatatctggtgcaatgagtaccaccggaccggcgtgacgttcggcaatttccgctaccagcgttgcacaggctgcgccggttaactcgcccagcagacgctgctcacccgctttgacgggcagcgtataacgatattgttcaggcataacggttgtcagattctcgttaggatatgcctcaacatatgggggcatatctctgataagcaatgctgttcattatccgtaatcgacatggtttagcaaattgaatcgccccggctggggcgatggcttagcgggagtaactgacggcagcgggcagactaggcggggagaacaacagatcgctgaatgcacgctgactaagttttcttaccagcaagcccgcaacagtacagatgaacaaactgacaaagggataaaccagcaggagtgtcagttcgacttgcgggctccagcgtgctgcgttcatttgcgcaagcagagttaagctgaatatttcaaccagaatgcgatgggtggtgtagatagcaatggtgttggagccaatcacattcagcaggctggtggagcgcataccgaatcgttgctcgtattgataaaacagcttcatgatcaccacaatgcttaccaggctcaacagcaggctgatagtaaacaaccaggcaccgaccgccagaacggtaagcaaagaagccatcagcagatggcggcgcaacggcacctctttaacacaggtcattattgttgcgccaaaccatgcgccaaggctgtaataaggcaaattgcggatcacactgttcattccccaccacggcgtgggaacgaaattaaccgccacactcagcagtacaaacaaggcgaatagtggcagcgccagacggctaaaaattttacataccacgaaatagacaattaacgcatacagataccacaagctggtgctggcggtgatcatcccgtgcaggaactcaccggtggaatcggcataagcggcattggaggcattgcttaaatcgcgctcaggtgccagccactggttcagcgcacttaacgccagccactgcaccacgccccaaagcgccagcacccagaagatgttccagatccgtttatcgagacaatttccccacggtacgctgtcgatatagcggcgaatcaaatagccggatataaagaaaaaaaccggcatacgaaagggggcaaggtaaagattgaaatagatccagcatttgctcaggacttcgcttaacggatgctgaaaagtggtcagatgcggataaaaggtaatgacgctgtgataaatcaccaccagacaaatacataaccctttgatctggttaatccatagctctttttgtttcatcaggacaacacgctcttttttaatttacatgcggttgatcctgcgggttatgacccgaggtgtaatgggtatctgtctgtattggatgatttttcagattaagatcaggcggcaagattgatgataaaacatggcaatttagccgattgatttacgggggcttttcagattagccctgacgatcacttacagttcagacgtttacccatcttgctttcgcttatatactcgtgtctttgctacagcaaccagacggatttcatgtaccaacctgtcgctctatttattggcctgcgttacatgcgtgggcgtgcagcggatcgcttcggtcgtttcgtctcctggctttctaccatcggcattaccctcggggtgatggcgctggtcacagtattgagtgtgatgaacggctttgagcgcgagctgcaaaacaacatccttggcctgatgccacaggcaattctctcttctgagcatggctctcttaacccgcagcaactcccagaaacggcagtcaaactggacggcgttaatcgcgtcgcacctattactaccggtgatgtggtactgcaaagcgcgcgcagcgtggcggtcggggtgatgctcggtatcgacccggcgcaaaaagatccacttacaccgtatctggtcaatgtgaaacaaactgacctcgagccggggaaatataatgtcatcctcggcgaacaacttgccagtcagctaggcgttaatcgcggtgatcaaatccgcgtgatggtaccatctgccagccagttcacgccgatggggcgtattccaagccagcgcctgttcaatgtgattggcactttcgccgccaacagtgaagtcgatggctatgaaatgctggtgaatattgaggatgccagccgtctgatgcgttatccggcaggcaatattaccggctggcgtttgtggctggatgagccgctgaaagtcgacagtttaagtcagcaaaaactgcctgaaggcagcaaatggcaggactggcgtgatcgtaaaggcgagttgttccaggccgtacgcatggaaaaaaatatgatgggtttactgctgagcctgattgtcgccgttgcggcgtttaacattattaccagtctagggctgatggtaatggagaagcagggcgaagtagcgatcctgcaaacgcaaggcttaactccgcgacaaatcatgatggtctttatggtgcaaggggccagcgccgggattatcggtgcgatcctcggagcggcgcttggcgccctgcttgccagccagttaaataatctgatgccgataatcggcgtcctgcttgatggcgcggcgctgccggtggctatcgaacctttacaggtcattgttattgcgctggtggcgatggctatcgcgctgctgtctacgctttaccctagttggcgcgctgccgccactcaacccgctgaggctttacgttatgaataagatcctgttgcaatgcgacaacctgtgcaaacgctatcaggaaggcagtgtgcaaaccgatgtgctgcacaatgtcagtttcagcgtcggcgaaggtgaaatgatggcgatcgtcggtagctctggttccggtaaaagtaccttgctgcacctgctgggcgggctggatacgccaacctccggcgatgtgatttttaatggtcagccaatgagcaaactgagcagcgcagcgaaagctgaactgcgcaaccagaagctgggctttatttatcagtttcaccacctgctgccggattttaccgccctggaaaacgtggctatgccgctgctgattggcaagaaaaagcccgctgaaatcaacagccgtgcacttgagatgttaaaagcggtggggctggatcatcgtgcgaatcaccgcccatctgaactttctggcggcgaacgccagcgtgtggcgattgcccgtgcgctggtgaataacccgcgcctggtactggcggatgaacctaccggtaacctcgatgcgcgtaacgccgacagcatcttccagttgcttggggaattgaatcgcttgcagggcaccgccttcctggtggttactcacgacctgcaactggcgaaacgtatgagccgccagttagaaatgcgtgatggtcgtctgacggcggaactgagcctgatgggggcggagtaatggcgatgcctttaagcttattaattggcctgcgttttagtcgcggacggcggcgcggcggcatggtgagcctgatctccgttatttctaccattggcattgccctcggcgtggcggtattgatcgtcggcttaagcgcgatgaacggctttgaacgcgaactgaacaaccgtattctggcggtggtgccgcatggtgaaatcgaggcggtggatcagccgtggactaactggcaggaagcactggatcacgtgcaaaaagtgccgggtattgccgctgccgcgccgtatatcaatttcaccgggctggtggaaagtggcgcgaatcttcgcgcaatccaggtgaagggcgttaacccgcaacaggaacagcgtctgagcgcattacccagctttgtccagggcgatgcgtggcgcaattttaaagcgggcgaacagcaaattatcatcggcaaaggcgtggcggatgcgctgaaagtgaagcagggggattgggtgagcattatgatccccaacagcaatcccgagcataaactgatgcagccaaaacgtgtgcgtttgcacgttgccggtattttgcagttgagtggtcaactcgatcacagttttgccatgatcccgctggcggatgcccaacaatatcttgatatgggttccagcgtgagtggtattgcccttaaaatgacggatgttttcaacgccaataagctggtacgcgatgcgggtgaagtgaccaacagctatgtttatattaaaagctggattggtacttacggctatatgtatcgcgatatccaaatgatccgcgccattatgtatctggcgatggtactggtgattggcgtggcctgtttcaacatcgtctccaccttagtgatggcggtgaaagacaagagtggcgatatcgcagtattaagaacgctgggggcgaaagatggtttaattcgcgccatctttgtctggtatggattgctggcagggctgttcggcagcctgtgtggtgtgattatcggcgtagtggttagtctgcaacttaccccgattattgagtggattgaaaagttgatcggtcatcagttcctctccagcgatatctattttattgatttcctgccaagcgaattgcactggctggacgtcttctacgtactggtcacagcattgttgctgagtcttttggcaagttggtatccggcgcggcgcgccagtaatattgaccctgcgcgagtccttagcggccagtaaaggcagtacattaaaacaaggagcggcaatgtattacgggtttgatattggtggaacaaaaattgcgcttggcgtgtttgatagcggtcggcagttgcagtgggaaaagcgggtgccgacaccgcgtgacagctatgacgcatttttagatgcagtgtgtgagctggtagctgaagctgaccaacgttttggctgtaaaggttctgtcggcatcggtattccgggaatgccggaaacagaagatggtacgctgtatgccgccaatgtccccgctgccagcggtaaaccgctgcgtgccgacctgagcgcacgtcttgatcgcgatgtacgccttgataacgatgccaactgttttgcccttagtgaagcctgggatgatgaatttactcaatatccactggtgatggggttgattctcggcaccggtgttggcggcgggctgattttcaacggcaaaccgattaccggtaaaagctacattaccggcgagtttggccatatgcgtctgccggttgatgcgttaaccatgatggggttggatttcccgttacgccgctgcggctgtggtcagcatggctgcattgaaaattatctgtctggtcgcggttttgcgtggctgtatcaacactattatcatcaaccgttgcaggctcccgaaattattgcgctttatgatcaaggcgatgagcaggcaagggcgcacgttgagcgttatctggatttattagcggtttgtctgggaaatatcctgaccatcgttgaccctgacctggtcgtcattggtggtggcttaagcaatttcccggcaatcacaacgcaactggcggacaggctgcctcgtcatctcttacctgtagctcgtgttccgcgcattgaacgcgcgcgccacggtgatgcgggaggaatgcgtggtgcggccttcctacatctaaccgattaaacaacagaggttgctatgctgagccgtcggggtcatcggttaagtcgttttcgtaaaaataaacgccgcctgcgcgagcgtttgcgtcagcgtatttttttcagagataaagtggtgccggaagcaatggaaaaaccaagagtactcgtactgacaggggcaggaatttctgcggaaagtggtattcgtacctttcgcgccgcagatggcctgtgggaagaacatcgggttgaagatgtggcaacgccggaaggtttcgatcgcgatcctgaactggtgcaagcgttttataacgcccgtcgtcgacagctgcagcagccagaaattcagcctaacgccgcgcatcttgcgctggctaaactgcaagacgccctcggcgatcgctttttgctggtgacgcagaatatcgacaacctgcatgaacgcgcaggtaataccaatgtgattcatatgcatggggaactgctgaaagtgcgttgtagtcaaagtggtcaggttctcgactggacaggagacgttaccccagaagataaatgccattgttgccagtttccggcacccttgcgcccgcacgtagtgtggtttggcgaaatgccactcggcatggatgaaatttatatggcgttgagcatggccgatattttcattgccattggcacatccgggcatgtttatccggcggctgggtttgttcacgaagcgaaactgcatggcgcgcacaccgtggaactgaatcttgaaccgagtcaggttggtaatgaatttgccgagaaatattacggcccggcaagccaggtggcgcctgagtttgttgaaaagttgctgaagggattaaaagcgggaagcattgcctgatgcactacgcttatcaggcctgcaaggggacgcaattaattgaatttgcgggttttgtgggccggataaggcgttcgcgccccatccggaataatacacgcgcacttttccggcctcttttatcgtttactcgtcaataacaatgcggcaataaacgtacagacaccaattagccctgcccagagtgggcttattctggtaatcgcaaagctattatcgatatacaaacataaagcctgataacccatattggcaatagtcatcgccactgcaaattttaacgcataaataaaacgagtcgtgtagtaaaagatcctggaaaataagataaacgtcgcagcccaggcgataaaacctaatgtgttggtgctgccggggggagcattttcatgctgttgtcctggatgcggataatacgttagtggcggcgtgctttgttttaatatctgtgcttgtagaacagccaatgcattattgattccctgataccagagatctgcatttaaataagccagcgtgtgattttctatcagaaggccgagatgtttatcgtccagaccactttcaacctggccgttggtgatcataattaaccgtggttcgcgggtagtaaatagtaacagaacacttccttttacatcactcaaactagaactcgcatgcgccagcatcgctttaccattttgtctgagactggcttcattattaatgtcgggtaaaaccacaataaacggtgcaattcccgtttgttggcgaaaaagctcggctttatgcgcgatctcttcagcatctggtacagtaccggtaacgtccgtaaaaagtgtcttcattattggaattaatggcttgctggctgctgtcagaggcaggagtatcagtaaactgagcagtataatgaattttttcatgggcgggacttccgtttcctgcgactttttttagaggagggcatacttattaataaaccgacggcgataaaaataacgcccataatgccgataaacccccatttaaaaaaattaacccacgggttatttatctcagccttttcaggatgcccgggagaataataaacattaactttatcgccttcgctgtcttcataaaaatcgctgccgatactgctattgaaaattagcgtgtaatctggcgtcggtcgaaaggcaacgacgggataccagctaccatctttacccgtgcgatgagaatgactggagtgccagacggtatcaacaatgacgccttcggtatgaatcgcgtctttgctataggtgaactggttataaaagacaacaacagaaatgaggatcagtaccagaccgataccgaggaatatacgaaagaaaactttactgtcctgactcattagccacatccttgctaactaaaaaacgggcggtaataccaccgcccgcttgctgaattaacgtcctgctttcagcttctgataatactcttcataaatgctgctggctgcgccaacgtcattctgccattcgccatttttaatggtttcagcatccgggtagagtgttttatcgttcgccacttctggacttaacagcttacgcgccgcaaggtttggcgttggataaccgatagtttcagcaacctgttttgccacatccgggcgcagcaggaagttgatcaatttcagcgcgccttctttgtttttggcatttgccgggatcgccaggctgtccatccagaaaatgccgccttctttcggccacaccacgtcaattggcgtacccgcctggcgtgcaacgaaagcagaaccgttccagatcatgccgaggttaacttcgccttccatgtacgggttcgccgggttatcggagttaaaggctgccacgtttggcatcagttttttcagctcgttatatgcagcttcaatctctttcggatcggtggtgttaccggagtagcccagcttacgcagcgccatctggaacacttcacgggcatcgtcggtcaacagcaggctgcctttgtactctggcttccacagatcggcccagctggtgacagatttcggatccaccgcatcaccgttaacaccaatcgccgtcgcaccccagatatacggaatggagtagtcgttattcgggtcaaaaggcttgttgagcatgtctggatcgagattgctgaagtttgttaacttgctcttgtcgatcttctggatcatcccttctttacgcattttatcaacgtaataggtactaggaaccaccagatcataggcaccgtctttgtatgttttcagcttggcgtacatggtttcgttgctctcgtaagtgctatagataaccttaataccggtttctttggtgaactgttcaagcagtcctggcggcacgtactcggtccagttgtagaaatacagcgtgttgttgtcatcggcgtgagcggcgctcatgcccagtgccagagcacccgccgcgagcaggtggcgactccattttttcatttaacgtcccctgtgttacctttcgttttatcacgagcaataagctggctggcaataaccatcaccaggctcagcaccagtaatatggttgccagcgcgttaacttccgggcttacgccgactttgaccatgctataaatttttaacggcagaatttcataacttggtccggtgacgaagctagaaactaccacatcgtccatgctcagggtaaagcttaacacccagcccgccgccaccgctggcattgccagtggcagaatgatttttcgcagaatggtaaattcgctggcaccgagatctttcgccgcttccagcattcgcacgtcaaaacctttcaggcggctatacaccgtcaccaccacaaatggcaggcagaaggtgatatggctgaacagcaggctccagaagccaagctgaatacccagcagcataaacagcaccagcaggctaatcgccatcacgatatctggactcatcatcaccacaaacagcattccgctaacgaacggcttaccacgaaagcgataacggtacagcgcaactgccgtcagactaccgataagcgtagcaaacgtcgcgctaaacaccgccattgttagactatgctgcgctgcctgtaacaggctgtcgttgttcatcagcaggctataccatttggtggtaaagccctgccagttgatgccaaagcggctgctgttaaaggagttcacaatcaaaataatgattgggatatacaggtacgcgtagatagcggtcataaaaccgccgcgaagcagtcgaccgatcattcgagttccaccttcttattcagcaaacgagaagcgcgccagtaaaccagcaacatcaggcccattacgatagtcagcgtaatgctggtagctgcaccaaacggccagtcacgaatattaaggaactggaccttgatgacgttaccgatcagcaggtttttcgcaccgcccatcaggtcggatacatagaacaggcccatcgctggcagcatcaccagcagacatccggcaataattcccggcatcgtcagtggaataatgatacggataaaagtctgtaacttgctggcaccgagatcgcgcgccgcctcaagcaacggcttatccagtttttcgatactggagtacagcggcatcaccataaacggcagcagaatgtaaaccagaccgataatcaccgcactgggcgtgaacatgatacggattggtgtgtcgataacgcccagccagagcaaaaactcgttgagatagcctttggtgctgaggaaaattttcagcccgtagatacgaattaaactgttggtccagaacggaacaatcagcagaaacagcagcagcggacgcaccttgtgtggcaacttcgccagaaaccaggcaaacgggtagcccagcaccaggcaggcgagggtggcgatcagcgccatattcaggctgtgcaatagcacttcaaaatagagcggatcgagcagacgcgtgtagttatccagcgtaaagaccattttgacaaaactggcgtcgtcgcgggtcaaaaagctggtgccaatgatcatcaggttgggcagaaagacaaacaacacaagccaaccgacaatagtgacaatcactacattctggaacttacttgtgttcttcatcagccagtacgacctcccagctttctacccaattaatggccattttttggtcgagagagtggtcaaagtcaggatcgtcttcattgaagaattcgctgaccatcaccatcttgccattttccagttcaacaacgctctccagcgtcatgcctttgtagttacgctcgcgaacgtaaccaatcagcccttcagcgtggttgtcgtcgttaatctcttcaacacgtaagtcttccgggcgcagcagaacatgcagtttttgccccggttcaacggcgaagttaacgtagatattacattcgcggccttcaacgttggcgcgtacgcgctgctcgtctagacgttcgatgacagtggcgttaaacatattgatttcgccaatgaagccggcaacaaacaggtttttcggctcttcgtagatttcacgcggcgtgccgtcttgctcaatgcgaccatcgcgcatcaccacaatcctgtcactcatggtgagtgcttcttcctggtcgtgagtcacaaagacgaatgtaatgccaagcttacgctgtaacgctttcagctcgttctgcatttgcttacgcagtttgtaatccagcgcactgaggctctcatccagcaacaacagacgaggcttgttaaccaccgcgcgagcaatggcgacgcgttgctgttgaccaccagagagctgatgcggtttgcgttgagcgaaggtttccaactgcaccatccgcagggcttccatcacgcggggcgtaatttcagcagcgggggttttttgcatgcgcaacccaaaggccacattttcgaacacggtcatgtgggggaaaagtgcgtagctttggaaaacagtgttcacatagcggttttccgccggaacgtgggtgatgtcctcgttatccagcatgatgcgtccggaatcaacagtttccagacctgcaatcaggcgaagaacggttgttttaccgcagccagaagggccaagcagcgtgaggaactcgccattgttgatagtcagatccagctggggaatgacctctttaccatcaaagcatttgcgaattcccgccaattgcaccagcggactaaggctactcggttgtttattcaattttttactctgtcccatgtaaacgcaacggatggcttaccgatgcggggtttgtggttaaccaccttggtgactcttaatgagggcggtaattctacggcaaaccgcttgaatcgccaatctttgttgtgaattactggcttagctttatattcattaaggtaatgctgataaatattcccgcttgcaggggtaaaagtgacctgacgcaatatttgtcttttcttgcttcttaataatgttgtcacaaaaagtgagggtgactacatggataaactacttgagcgatttttgaactacgtgtctctggatacccaaagtaaagcaggggtgagacaggttcccagcacggaaggccaatggaagttattgcatctgctgaaagagcagctcgaagagatggggcttatcaatgtgaccttaagtgagaagggcactttgatggcgacgttaccggctaacgtccctggcgatatcccggcgattggctttatttctcatgtggataccagtccggattgcagcggcaaaaatgtgaatccgcaaattgttgaaaactatcgcggtggcgatattgcgctgggtatcggcgatgaagttttaagtccggttatgttcccggtgctgcatcagctactgggtcagacgctgattaccaccgatggtaaaaccttgttaggtgccgatgacaaagcaggtattgcagaaatcatgaccgcgctggcggtattgcaacagaaaaaaattccgcatggtgatattcgcgtcgcctttaccccggatgaagaagtgggcaaaggggcgaaacattttgatgttgacgccttcgatgcccgctgggcttacactgttgatggtggtggcgtaggcgaactggagtttgaaaacttcaacgccgcgagcgtcaatatcaaaattgtcggtaacaatgttcatccgggcacggcgaaaggagtgatggtaaatgcgctgagcctggcggcacgtattcatgcggaagttccggcggatgaaagcccggaaatgacagaaggctatgaaggtttctatcatctggcgagcatgaaaggcaccgttgaacgggccgatatgcactacatcatccgtgatttcgaccgtaaacagtttgaagcgcgtaaacgtaaaatgatggagatcgccaaaaaagtgggcaaagggttacatcctgattgctacattgaactggtgattgaagacagttactacaatatgcgcgagaaagtggttgagcatccgcatattctcgatatcgcccagcaggcgatgcgcgattgcgatattgaaccggaactgaaaccgatccgcggtggtaccgacggcgcgcagttgagctttatgggattaccgtgcccgaacctgttcactggcggttacaactatcatggtaagcatgagtttgtgactctggaaggtatggaaaaagcggtgcaggtgatcgtccgtattgccgagttaacggcgcaacggaagtaagcgaaaagggatgcggcatgtgatgccgcatccggcttaaatccaaacttacccttcgaagaaccaatacccgctattgaccagcgccgcgagcatcgcgaggaaactcggatcttccagcgcatcgccaaaattctccgcagtcagcgcaatgttgctggcgagtgcatccagtgccggacggtgcggggaatcgatcttctcaccattggcatacacgtcgtcgccaatgcgcaatacgcgcagaccacccaggcgcaccagcacttcaccttgtttcagcgcatcgtagatttcatccggctgataaggcggctctggcggcgcgatatccagttcatgacgactctgggatataaactcgccaaaccattgcttaaagtgttccggctggttgatcaattcgagcatcatctcacgcagtttatccatctcttgcggcagaacatccgcaggatgagcgcgaggtggaacatccggatcgctgtagtagttgccgcccagttcacgttgcagcacataatcggcaaatccactaatcagttcccgcgtatttggcgcgcgaaagcccacggaatagttcatcgcattttccagcgcgtagccttcatgcgggaatcctggcggaatataaagaatatcaccaggctccagctcttcatcgatgatggcttcgaacggatcgacctgtaacagatccggatgtgggcagtgctgtttcatttgcagcttttcgcccactcgccagcgacgacgtccggtaccctgaatgataaacacgtcgtactgatcgagatgcgggccgacgccgccgccgggtacagaaaaagaaatcatcagatcatcaatacgccagtccggtagttcacggaacggtcgcatcagcgcggcggtcggctcatgccagtggttcactgcctgtaccagtaaactccagttggtttcaccgagatgatcgtagctttcgaacgggccgtggctgacctgccatttgccatcctggtgactgaccagtcgactgtcaacttcgctttccatcgccagacccgccaactcgtctggagagatcgggtcaataaaattattaaagccgcgttttaacaccaccgggcgtttctgccagtgacgttcaagaaaatcgggccagttaagagtgagttggtattccatgttaagcatccacaggctggtatctgcaaccgattataacggatgcttaacgtaatgcgtgaagtatgggcatatttattcatctttcggcgcagaatgctggcgaccaaaaatcacctccatccgcgcaccgcccagcatgctctctccggcgacgattttaccctcatattgctcggtgatttcgcgggctaccgccagccctacaccttgcccagggcgtaaagtatcaacccgttgaccacggtcgaaaatgacctctcgcttgcttaatggaataccggggccatcatcctcgaccacaatatagagatgctcgtcggtttgccttgcagaaatttcgacaaactcgaggcaatatttacaggcattatccagcacgttgcccatcacctcgacaaaatcgttctgctcaccgacaaagctgatctctgggctaatatcgagagagatattgacccctttgcgttgatacactttgttcagcgcactggtgagattgtccagcagtggggcgaccggatgcagctcgcggctgagcaatgtcccgccgcgcatactggcacgatgcaggtagtagccaatttgctgactaatgcggctgatttgctccagcattaccggctcagcatcactgacgctcatcttttcactacgcagagaacgcagcgtactttgcagcaccgccagtggcgttttcagactatgggtcaggtcggtgagcgtcgtacggtatttgtcgtaacgttcgcgttcactttttaacaatcggttcaggtttcgtaccagactggtcagttctcgcgttgtggctggattgagcaattcgcggttatgttcttccagttcgcggacttcttttgccagggcttcgatggggcgtaaactccaccaggcggcgacccacagcagcgggatcactaacagcagattggcactgagcacatagataaaccagctccagaccatataggaactttttagctccaccggaatggtatccaccaccacaatggttaattttggcatccggcttgttgccgggtagacgtttactgccacgctgtgggtcatctccgcgtcgtcatcatcttcccgcacttcctgcaactgttgctgtatgctatgatctccactcagcaagaggctggtatcgttaacatccgcttcaatttcatgaaaaccattgcttttcagccagtcaggctggatcatcttcatcagccagggcacgtcacgttgcgcccataaaagctgcccgttctcatcataaattagcgtcatggtggggctttgcttgtcgatattttcgggtaactcgacatgcaacttattgttttcccacttcgcaagggtatagaacagattgctctcgccacgtaacagccgaaacgtagttttatcgaaactgacgctataaccgatcagcgcgaccattccgtaggcaaggctaagcaccagtactaccgctgccgttgccaacagaaaacgtacccgcaggctgagcgggaaaaaaagacgcagtaattttttcatcagcgcaattcgaacagatagccctggccgcgaacggtggtaatcacttcttggggatattgtgcctgaatttttttgcgcagacgtcccatcagtacatcaatggtatggctttcccgcagctccgcatccggatagagttggagcattaagctatctttgctgaccactttgccattattgcgtatcaacgtttccataatagtgtattcgaacgcggtcagtttgatcacttcgtcattaatagataattcacggcgagagagatcaacctgaaacggggggaggctaatgacctgactagccagaccgctattacgccgcattaatgcctgcattcgcgccatcacctcttcaatatgaaacggtttagtcacataatcatcagcaccggcacttaatacttcgactttgtcctgccagctttcacgggcggttaataccagaatcggcagactaacatcgttgctacgccagcggcgaatcagactcagaccgtcctcgtctggcaatccgagatcgacaatcgcaatatccggtatatgttcattgagataataatcggcttctttggcatcttctgcgtcatcgacctgatgaccagcatcctgaatctgaactttaaggtggtgacgtaacaacgcattgtcttcaacaaccagtacgcgcatttttatttctccctgtcttaattattaaaatagtgtaacgcgattatgtggttatgggggtaaacattaaataaaccagcggggaggggaggtaaagtgaaaaaataaaaagcggataatcttaataagcaggccggacagcatcgccatccggcactgatacgaggtttatttcagctcatcaaccatcgtgatagctcgaccaatatagttagccggcgtcatcgctttcaggcgggctttctcttcttctggcaacgccagaccatcgataaactgcttcatgccttcggcgtcaacgcgcttaccgcgagtcagctctttcagcttctcgtacggtttttcgatgccatagcgacgcataactgtctggattggttcagccagcacttcccagttgtgatccagttcatccagcagatggtcacggttcacttccagtttgctcacgcctttcagggtggattgatatgcaatcaaggcataaccgatacccacgccgaggttacgcagcacggtagagtcggtcaggtcacgctgccagcgggaaaccggcagtttgcttgccagatgctgcaataccgcgttggaaaggcccagattcccttcggagttttcgaagtcgatcgggttaactttatgcggcatggtggaagaaccaatctcaccagcaatggttttctgtttgaagtggttaagggcgatataaccccagacgtcacggtcaaagtcgatcagaatagtgttgaagcgcgcaacgcaatcaaacagttcggcaatgtagtcgtgcggttcgatctgggtggtgtacgggttccactgaatacccaggctggtgacgaactcttcgctgaactgatgccagtcaacttccgggtaagcggcgatgtgggcgttatagttaccgaccgcgccgttgattttgccgaggatctccacctggttaagctggcggtactggcgctccatacggtaggcgacgtttgccatctctttaccgatggtactcggcgtggctggctgaccgtgggtacgagacagcagcgggatatcgcgatactgaacggcgagatctttaatgccatcaatcagttgacgccagtatggcaggatcacttcatcacgcgcggttttcagcattaatgcgtgggagaggttattgatatcttcgctagtacaggcaaagtggatgaattcagaaaccgcgtgcagttccgggatctccgccactttttctttcaggaaatactcaaccgctttaacgtcgtggttagtggtacgctcgatagttttgatgcgcgccgcatcttcttcgctgaaactggcgacgattgcatcaaggtaaccgattgcgtcggcagcaaaagcaggaacttccttgatcgctgcgtgcgcggccagtttttgcagccaacgtacttcaacttgtacacggaatttcagcaaaccatattcgctgaaaatcccgcgcagcgcgctgactttatcgccgtagcgtccatcgacaggggaaacggcggtcagactggataattccatagatcacaactccggggttaaatgagcaagaatttgttttgcctgagtggtcaggcgattacgagaaaacatcagttgcagacgtccgccgccgacctggtgccagagcacggcggcgcgaatgcctgccagcagggttgcgcgaactttcgcctgcacttgtgggctttgcagtacagcaggggaaccggtgacctgaatgcgcgggccaagcgggctaatcacatcaacatagatagcagccatcgcgctcatcagcgtttcggactgtaaatcgaagtgttcgagctggcgttgcaggccgttgatccggttgcccagagtgtcgagcgcgcctttcgcactggagagtttgcgctcaagcaccatcaagctgagtgtgtagcgggttaattcggcgtttaagccctggcgactgctggcattgagcacgccgagcagggtttccagcccgacgcgcaggttggcttcgctaccgccaaaaaccgccagcgtgctgctggggttcatatcaataatactgttgagactgacgtgtagcgcatcggcatcacaatgcccctggtgagcgagttgttgcaccaggcgtgcgctctgacaaataccggccagggcgagggtgatgtcatagtaattctttgccacgttcactgcttccttgttttaagtaaagataataatcagaccggcagcggcagacgctgctcaataataccgccaccgaggcacacttcaccgttatagaagacggcagactggcccggcgtcacggcggcaaccggttcatcgaaaatcacttcaatgcgatcatcgtccagcgccttgacggtgcaagggatatcggtctggcgatagcgggtttttaccgtgcaacgcatagtgccggtgaatggttcgcgatcgacccagtgcaactgctgggcaatcaacccgacagacatcagccgcgggtgttcatggccctgagcgacaaccagaatgttgttttcgacgtctttgtccaccacataccacggttcttcggtaccttctttggtgccaccgatacccagacctttacgctgaccgagagtgtgatacatcagcccctggtgctcaccaatttcatcgccatcgacggtaatgattttgcccggttgcgccgggagataacggcccaggaactcgcggaatttacgttcgccaatgaagcaaatgccggtagagtcttttttcttcgcggtgaccagaccaagatcttcagcaatcttacgcacctgcggtttttccagttcgccgaccgggaacaggctttgcgcaatctgctcatggctgagcgtataaaggaagtagctctggtctttattgctgtccagaccacgcagcaggcggctcttgccatcgacatcggcccgacgtacgtaatgaccggtagcgatataatcggcacctaaatcttcggcggcaaattcgaggaaggctttaaatttgatctctttgttgcacagaatatccggattcggcgtgcgaccggctttatattcggcaaggaacagttcgaagacgttgtcccagtactcggcagcaaagttaacggtgtgcagttcaatgccgagcttgtcgcagacagcctgggcatcagccagatccgctgccgctgtgcaatattcctcaccgtcgtcttcttcccagttcttcataaacaggccttcgacctgatatccctgttgttgcaacagccaggcagaaacggaggaatcgacaccgccggacatgccgacgattactttttttgcggtttcagacattggatcactcacgacattgaacttcaaggcggcgtattctatcacgcagccttttagatgacaccctttgtaaaaggccagttaaaatcgccaatcatctccagcggataacgttgcccgctttgataacaacgaatactttccgccaccagcgggctacgaagattactcgcctgtaaaatttcttcggcgctgacccaacggcagcagtcgatatcgctgtcatgaggctgggtcgggcatatttgctcaagctcaatggcaaagaggaaacgcaaaaacggcgttttatctggcgcaatccactgatgcatacgaataaagtgttgcggctgcgcgctgatgccggtttcttcccacagttcacgggcggcggcttccactaaggtttcatcggcttccagatgcccggcaggttggttccataacgctttaccattaatcgtctcttcaacgactaaaaatttgccttctgcgtgcaccacgcaagcaacggtaacgtgcggtttaaacattttgcatccttaatctgtcacttctcgccattcaccattggcaagattatccaaagagtaatcacccatcgcatagcgaatcagtcgcagcgtggggaagccaacatgggcggtcatgcggcgcacctggcgattacgtccttcatataaggtgatcttcagccagctggtgggaatacttttgcgttcacgaattggtggattccgcggccataaccacgcgggttcgtcaaccagctccgcgccggcgggcagggtagggccatcatttaaggttacgccattgcgcaaggcttcaagtgcgtcttgtgtgggaataccttccacctgcacataatagatttttccggtgcgtttacccggctgggttaaacgcgcctgcaacgcgccgttattggtcagcaccagcaacccttcgctatcgcggtcaaggcgacctgctgcataaacaccctgaaccgggatgaattcttttaatgttttgcgtccggcttcatcggtgaactgcggaagaacatcgtagggtttattgaacaggatcacacgcgtgggctggttttcaggtttacgcctggtagaacgttggctgctgaatcgcttaacctggtgatttctaaaagaagttttttgcatggtattttcagagattatgaattgccgcattatagcctaataacgcgcatctttcatgacggcaaacaatagggtagtattgacaagccaattacaaatcattaacaaaaaattgctctaaagcatccgtatcgcaggacgcaaacgcatatgcaacgtggtggcagacgagcaaaccagtagcgctcgaaggagaggtgaatggaaagtaaagtagttgttccggcacaaggcaagaagatcaccctgcaaaacggcaaactcaacgttcctgaaaatccgattatcccttacattgaaggtgatggaatcggtgtagatgtaaccccagccatgctgaaagtggtcgacgctgcagtcgagaaagcctataaaggcgagcgtaaaatctcctggatggaaatttacaccggtgaaaaatccacacaggtttatggtcaggacgtctggctgcctgctgaaactcttgatctgattcgtgaatatcgcgttgccattaaaggtccgctgaccactccggttggtggcggtattcgctctctgaacgttgccctgcgccaggaactggatctctacatctgcctgcgtccggtacgttactatcagggcactccaagcccggttaaacaccctgaactgaccgatatggttatcttccgtgaaaacagcgaagacatttatgcgggtatcgaatggaaagcagactctgccgacgccgagaaagtgattaaattcctgcgtgaagagatgggggtgaagaaaattcgcttcccggaacattgtggtatcggtattaagccgtgtagcgaagaaggcaccaaacgtctggttcgtgcagcgatcgaatacgcaattgctaacgatcgtgactctgtgactctggtgcacaaaggcaacatcatgaagttcaccgaaggagcgtttaaagactggggctaccagctggcgcgtgaagagtttggcggtgaactgatcgacggtggcccgtggctgaaagttaaaaacccgaacactggcaaagagatcgtcattaaagacgtgattgctgatgcattcctgcaacagatcctgctgcgtccggctgaatatgatgttatcgcctgtatgaacctgaacggtgactacatttctgacgccctggcagcgcaggttggcggtatcggtatcgcccctggtgcaaacatcggtgacgaatgcgccctgtttgaagccacccacggtactgcgccgaaatatgccggtcaggacaaagtaaatcctggctctattattctctccgctgagatgatgctgcgccacatgggttggaccgaagcggctgacttaattgttaaaggtatggaaggcgcaatcaacgcgaaaaccgtaacctatgacttcgagcgtctgatggatggcgctaaactgctgaaatgtagtgagtttggtgacgcgatcatcgaaaacatgtaatgccgtagtttgttaaatttattaacgggagcgtaacgctcccgttgttttttgttaggctgctaacggttatcaaaattttatcaaaaaaagttatcaaaacccctcggtagttttggggtaggctggccggtcaggtggtagttctactactagtctcccacatagatattccttagctttttattattgctggcggacgctcgttaatatttaaggtcttcattgattaagacatccccaaagttagttatgtattcactgttattaggacaattatgaattaccactccttacacccgctcaaatattgttaaattgccggttttgtatcaactactcacccgggactcgccaggggacagccaacaggcattgggtgcaatcaccttagcgttcaggtacatgcggaatgtaaaaaaggccgcgagcgcggccccttcacatacatctttagtactgagactgtttaacctagggaattattatcgtattatattgcattacaactcccaacagtgacatatgaacttcctgctttactccacgactttaatatttcaaggccatgtgaagaacatatttcttgcactgcgagttcatcgagtaatccatagtaagaaacactttttgaatttttgtaaatgtatccgtaaagatgttttcttcctgtttcgtattttttgaagtatgagcttttatattgatttacaataagagtctcacctcctgattttagtaatctcttgatgctaagaactatcagataattcaaagcgtggctgtgatgataggaattatgttttttacgtgaatgagaataatcttaaatgaggaataactcattgattgacaatatttttattcaagaagtgtcattgactgttaacgcaatgttgtaaaggtaagataatctgatttatcaatattattgtgtgatttttatgtgagcagaagatattcatcagcaacgattacattagtcattttattttgccgacggcctcattgtcgaaagataagcgtacgacagtattatcagaaaagagtgattttttatccaactacacttcagcgcactgcgtgtaaaaaatgcctctttcttatgcgggatatcatcatttcatcatgatgtctttggtgagcggtgaacacaatgcacctgcgctgtctcttcaggatgaatcccctggtctggtgcctgcgggctgatgttgcagcagagcttaggagtcttagacgctactatcatttatccaatggcatggaaagcaaaagtgtcgatacccgcagtatatatcgtgaactgggtgcaacgctgagttacaacatgcgcctggggaacggtatggaaatgaaccctggctgaaggcggctgtgcgcaaagaatttgtcgatgataaccgggtgaaggtgaataatgacggtaatttcgtcaatgatttgagcggcagacgtggaatataccaggcagctattaaagccagtttcagcagtacgtttagcggacatctcggggtggggtatagccatggtgccggtgtggaatccccgtggaacgcggtggctggtgtgaactggagcttctgaccatcaacgattaaactgcgcttcggcgcagttttcgtttacaggatgttgaaagggaaaattctggggcaaaaaaagcccgccagttacggcgggaaacctcatcctatgggagaacaatgaataatgaaattgcggggttatcatctcccagtatatccatactaacaataaggttatttactcaaccaggcataaacattttgttttgtgcgtgggaacagccttaaggtgtaaagggggaggtggaaatagcaatgaggagtatcagcaagaatactcgccgctttaccacaacgtggatgagagggatgaaaaactcaaggcagagataactctgccttgaagataaatgcgcttttacagcgggcttatttcagctcttctgcttccggtaaggtcacgttcagctcaagaatagaaatatcgccatctttttgctcaagctgtacggttaccatctcaggatcaatttgtacgtatttacaaatgacctcaagaatatctttacgcaactgcggcagataatgcggttctgcatcgctgcgacggcgttcagcaacaataatctgcagccgttcttttgcaatgttggctgtgtttttcttccggctgagaaagaaatcgagtaatgccataacttatcctccgaacaagcgtttgaggaagcctttcttctcttcttcaatgaagcggaaaggacgttcttctcccaacagacgttctacggtatctgcgtaggctttacccgcatcggcgttaatgtcgagaatgaccggttcaccctggttagaggcgcgcaatacactttgatcctctgggatcacgccgacgagtttgatgcgcaggatctccagcacatcttccatgctcagcatgtcacctctgcttacgcggcctgggttatagcgcgttaacagcaggtgctctttaataggctcttcgccattttctgcgcggcgacttttgctcgccagaatgcctaaaatacggtcagagtcgcgtacactggagacttccgggttggtggtaataatggcttcgtctgcaaaatagagtgccattaacgcaccggtttcaatccctgccggggagtcacaaacgataaattcaaaatccatcgctttcagatcatcaagaactttggcgaccccttcacgggtgagggcatctttatcgcgtgtttggcttgccggcagaatatagagattttcagtacgcttatctttaattaacgcctgatttagcgttgcatcgccctgaatgacgttgacgaaatcgtaaacgacccggcgttcacaacccataatcaggtcgagattacgcaggccgatatcaaaatctatcacgacagttttctttcccttctgggccaaaccagtggcgatggccgcgctggaggttgtcttaccaacaccccctttgccgctagtaacaacaataatgcgtgccatagaaattccttgttaaaaagggatcaatttaacggttgaacggtcaaagcgttttcgactaactgcagtcgcgccgctttgccataaaattctgctgggatttgatcactcagccagtattcacctgcgatggacaccagttccgccatcaggttcgtacaaaatatttgcgtttcccggtcaccacttgcccctgccagcgcacgaccgcgcatcatgccatagacatgaatgttcccatcggcaatcaattcggccccagcgctaacgtggcttgtaacaatcagatcacattgtggagcataaatacgctgaccggaacgcaccggggtatctattaaacgcgtttttgtgaccggcgttgtattttgcgctggagcctgcggtgtgggagctggacgtggcgctttttcctttccttccgtcaggataggcagccccatcttttcaatttcggctttaagttgcgcatctttgcagccacttacgccaataacccgcaaaccggttgcgctaaccgccttatgcatcgcactccagtttaccgggtcttccagtgcactgacgttgagtacaacgggggcatgttttaaaaatgcgggggcctgagcgattttgtcttccagcgcctgatggataaccttaggttctgcctcatgcagatgaaccacagataaagtgaagctactgcctttaagctcgattggcgtgttactcatcctggccttactcaattagctattaatcatcgccagcgcgcgatgatgttccgaagactataaggcatgttatagtctggattatattgaggcaagtcaccctcccatttattcagagtaaaagtctattctgtgataaatggcgctgattcatagcttaaaaaatacccttgtcaatcaacccattgccgtcgtacttttgattgttcttatttacgcttcctttttccgcaccctaatcgtgacagcatctccagacctgtttaaatatccagtattgaggcaagtgtattttttcaccacgccaggctttcttaactttccattttttgcggcatcattaaagaacagatacccgttatcttaatatccgccacagaattgctctatcatagaaaccgcagaagacgtctgatacttctgtcaggtcatcgtaactcgtccaggtcagcggttttgattacggattgatgatgaaatgagcataagtgttgtacggttggattatcaggatgtgctatgaatatgatgcgtattttttatatcggattgagtggtgtggggatgatgttcagtagtatggcgtctggaaatgacgctggcggacttcaatctccggcgtgcggcgttgtttgcgacccgtatatttgtgtgaacagtgatggcatttccccagagttaacaaggaaatatctcggcgaaaaagccgctgaaaacttacaaagtttacaaggctacgatcccagcgaatttacattcgctaacggtgtattttgcgatgttaaagaaaaattatgtcgtgatgatcgttattttggtgtggatggtaagcggagtggaaaaatcaatcaaaccaccacaaagatgttatttatgtgtcgtgagtgatgtcttgtttacattatgttctattcgtcattaacctcttgagcgacagagaggagtggggcattaacgtttatgacggggagagtccccgtcggttgacatttacttaatttgaatatcgacgttatattttttagttttgtttttacgggcgtcgtttcgggtttgcaacactcgcagctcatatttgccagaagcagggagactgtattgtccgtgactatcgagttctggggaatatctggataaatcaacactatcatcgattcctggcccgaagaggtaagtatcagcgccttcattagagatactcacatgcactttctgaccttttttggcatagaaggtatatgtatcgtaatcgtatccctttatttcgccggagtactgagcgctgctatggccttttctgaactcaacattgacattcttacccgcagcaaagctcgtggaggttagcagtgcaagcagcaatacagccttcctgatgctcttgattttcattggtagtctcctgttcagaatgagtacgatgaactgttataatataacaatccctaacgggagaattccagtggctttcctgcgttcggtaaaatcacgttgcggcatttttgccggggggattacttataaagggggcatggactcaacaaaccgtagaaatctacagctggctggcttgtggcgcgggtttcattgatgttagcttatgccaaaacctggcatcttaaagagtaaaagtatgttttgtgtgatttatcgaagcagcaagcgtgaccagacctatttatatgtcgaaaaaaaagacgattttagccgtgttcctgaggaactgatgaaaggttttggtcagcctcagttagcgatgattctgccgctggatgggcggaagaaactggtcaatgccgatattgaaaaggttaaacaggcattaaccgagcaaggttactatttgcagttaccgccaccacccgaagatttgctgaagcaacatctttccgtcatggggcagaaaacagacgacactaacaaataaccgatatccggcggtggcattatctttgtcggcgcgggttttcatatccacgataaggtgaggggaacgttatgtatcaacatcacaactggcaaggtgcgctgctggattatccggtgagtaaagtagtctgtgttggcagtaactatgccaaacatattaaagagatgggcagcgcagtgcccgaagagccagtgctgtttattaaaccagaaacggcactgtgcgatctgcggcagccattggcgatcccatccgatttcggtagtgttcatcatgaagtcgaactggcggtgttgattggcgcgacactgcgtcaggctacggaagagcatgtccgcaaagccattgccggttatggcgtggcgctcgatctgacattgcgtgatgttcagggaaaaatgaagaaagccgggcagccgtgggaaaaggctaaagcgtttgataactcttgtccgctttccgggtttattcccgcggcggaatttaccggcgacccgcaaaatacaacgctgagcctgagcgtaaacggcgaacaacgccagcaaggtacgactgcggacatgatccataaaatcgttccgctgatcgcttatatgagcaagttttttaccctcaaggccggtgacgttgtgttgacaggcacgcctgatggcgtcggcccgttgcaaagcggtgatgagctgacagtcactttcgatgggcattctttgacaactcgcgttttgtaatactttttgccgcctgaaagcggcggcaaaacttgcatcgctgtgccagactggttataaggtgcgttttaacgtaatggcggaacacctgatgagcgatgtacctttctggcaaagtaaaaccctggacgaaatgagcgatgcggaatgggagagcttgtgtgatggttgcggtcagtgttgcctgcataaactgatggatgaagacaccgacgaaatctacttcactaacgtcgcctgtcgccagctcaatattaaaacctgtcaatgtcggaactacgaacgtcgtttcgagtttgaacccgactgcattaaattaacccgtgaaaatctgccaacattcgaatggctgccaatgacctgcgcttatcgtttgctggcggaaggtaaagatttacctgcgtggcatccgctacttactggtagcaaagcggcaatgcatggtgaacgtatctctgtgcgtcatatcgcagtgaaagaaagtgaagtgattgactggcaggatcatatcttaaataaacctgactgggcgcagtgataaatttaatagatgctgatgggggctttcttaatatacgtctggatgctcgccatttcgtagccctgtttttgaaagcgctctgtcataatgagagttacccgataccttattatcaacaggtaactctcaatctttaaaaaacgtctgtgtttttaaatgtgataaaccttataccttgagtacatggagagaataatcgcttatcagacttcaggtacctcaaagagtgtctttttaccgtgtcttttctgatactcattacaggtgttaatcatttttttggccgcttcttttagcaaagaaagcattaaatcatcataatcaacgtagaatctggttgtttcagtttccgtttttatctcaccgatggcggctatttcggtggttaatttcaatttggcggcatcgatatctttattcgcttgtttaaccgtgttagacagggtggtaaagaaattctgcacagattttaacttgttcttcaattctggaatcagttttccttcaactacgcccgcagcaatagaataggaaatgattaatccaaatggaccggcgacgacaccggctgcggcaccggcatatgcttccttcctgattttatctacctgactctggaaatagctgcttttttcactaaaatcattggttaactggctatctaacgccagcagtttcccggaagcgttgttgaaactttgactgcttaccagcagggatttttgcgcttcattcagcttcgtgatgccgtcatccagtaccttaatgagaatgtctttctgggcggatgctttcttctcattgtactcatcaaatagcaaaatatacgctgcgagcaattgcgtcgcaacaccacaccattcatacactgtttgggttgcttcaaaatacttatcctggctatccataagtaaggttttaatatcgccgactaaaacggaggctgcctgactatactcctgtttaaagcgacttaactcttttatggtttcatcaaaggtctgccaggggatgacctgatcgagatatttattataaagatctaatgctccatctgcggtttcgattgcgtttttaactacttctaccgttttatctgcaacgatttcagtcataatcattcgcctctttaaatatataaattgtaatgaaactcctgttttacaactattaataaattttacttcatctaattcatagttagccgggcgggatgcgtcaatgtctttatttctattaatatgataaatatcaaacaatgtttaatgtcattatggcgaatgcttctattctattttttagccgggtgatatttttcatttctgctggatgagcgtcgtcgccagaaggccacgtgagcacaagataagagaacgaaaaatcagcagcctatgcagcgacaaatattgatagcctgaatcagtattgatctgctggcaagaacagactactgtatataaaaacagtataacttcaggcagattattatgttgtttatcaagcctgcggatctccgcgaaattgtgacttttccgctatttagcgatcttgttcagtgtggctttcctagtccggcagcagattacgttgaacagcgcatcgatctgaatcaactgttgatccagcatcccagcgcgacttacttcgtcaaagcaagtggtgattctatgattgatggtggaattagtgacggtgatttactgattgtcgatagcgctattaccgccagccatggtgatattgtcatcgctgctgttgacggcgagtttacggtgaaaaaattgcaactacgcccgacggtacagcttattcccatgaacagcgcgtacagccccattaccatcagtagtgaagatacgctggatgtctttggtgtggtgatccacgtcgttaaggcgatgcgctgatgtttgccctctgtgatgtaaacgcgttttatgccagctgtgagacggtgtttcgccctgatttatggggtaaaccggtggttgtgctaagcaataatgacggttgcgttatcgcccgaaacgctgaggcaaaggcgcttggcgttaaaatgggcgatccctggttcaaacaaaaagatctgtttcgtcgctgtggcgtggtttgctttagcagcaattatgagctttacgcagacatgagcaatcgggtgatgagcacgctggaagagctaagcccccgcgtcgagatttacagtattgatgaggcattctgcgatctgacaggtgtgcgtaattgtcgcgatctgactgattttggcagagaaattcgcgcaacggtgctacaacgtacccatcttactgttggtgtggggatcgcccagaccaaaacgctggctaagcttgccaatcatgcggcaaaaaaatggcagcggcagacgggtggggtggtggatttaagtaatctggaacgccagcgtaaattaatgtctgctctccccgtggatgacgtctgggggattggacggcggatcagcaaaaaactggacgcgatggggatcaaaaccgttctcgatttggcggatacagatatccggtttatccgtaaacattttaatgtcgtgctcgaaagaacggtgcgtgaactgcgcggcgaaccctgtttgcaactggaagagtttgcaccgacgaagcaggaaattatctgttcccgcagctttggtgaacgcatcacggattatccgagcatgcggcaggccatttgtagttacgctgcccgggcggcggaaaaacttcgcagcgagcatcaatattgtcggtttatctccacgtttattaagacgagtccatttgcgctcaatgaaccttattacggcaatagcgcgagcgtaaaactgctgacgcccactcaggacagcagggatatcattaacgctgctacgcgatctctggatgccatctggcaagcgggccatcgttaccaaaaagcgggcgtgatgctgggggatttcttcagtcagggagtcgcgcagctcaatttattcgatgacaacgcaccgcgccccgggagtgagcaattgatgacggtaatggatacactgaatgctaaagagggcagaggaacactctattttgccgggcaggggatccagcaacaatggcagatgaagcgagccatgcttagtccacgttatacaacgcgaagttctgatttactgagggtcaaataaatatagcggcaggaaaaaagcgctcccgcaggagcgccgaatggattagcgaccgaacagatcacgttttttcgctttaaacggctgggaaatcaccaccagcactgcgacaatcaggtaagcgataaaaataccgagcagccactgcggcatttccagacctaaaaaatcccactgacgctcggcgcaatcgccagaggcgacaaacacttgcggcacccacttatccagcggcagccattccgggaaacgaaccataaaatcacaggtggcaaacgggctaggatagagctgaagcatggtgtgctcgtaagttaactgcacaccgcggaacgcactatacaaccagataaccatcgctacataacgcagcggagttttcggggcgatcgcgccaatcagcgcagcacccagaacgccgaataacgcgcagcgttcataaatacagagcacgcaaggtttcagtaacatcacatgctggaaccacagcgccgtcagttccagtgccagagcagtaaacgccatcaacagccacgcgccccggccttgactacattggttcaaaaatcgcaacataatcatttccctgcaatatgcatagagtgcgcagtttaaaccaattcattcgctgcgccaccaggaggcagcaaaaataggacgcaattggacaattatcgggcgaaaaggcaaaccgggcatttgtatgcccggtaagttgttatcaaagcgttgctatccagcccatttgcataaaccattcggttacaggggcaagcgtaaactcgacgcagagcaagccgacgagtgtcaggacgagggtgtaaggcagggccatccacaccatgcggccataagagaggcgaatcaatggcgcgagtgcagaggtcagcaggaacaggaacgcagcctgaccgttcggcgtagcgacggagggcagattggtaccggtattaatggcgaccgccagcagctcgtattgcttcaacgtgatagcgccactttccattgccgctttcgcttcgttgatataaatcgtccccacgaagacgttatcgctaatggaactcagcagaccgttgaaaatatagaacaggctcagctgagcatgttcgcttgcctgcaacacaaactgaataattgggctaaacagttgttggtcgataatcaccgcgactacgctgaaaaacaccgtcaacagtgcggtgaatggcagagattcggtgaaggctttaccgatagcatgctcatcggtgacaccggtcaaacttgttgccagaataatgacactcaaaccaatcaagccaacttccgccagatgcaacgccagcgcagtcaccagccagacgccaataatcgcctggacaatcagacggattttatcctgacgggtacgctggtggcggctttgatcgtcaaactgttgcaacacttcgcggactttctccggcagcgtttcaccgtagccaaaccaacgcagcttctctaccagcaggcaggttaacaggccacaaatcagaaccggaacggtcaccgggctcatgcgcaggaagaaatcgccaaaatgccagccagccgctttagcgatgatcaggttctgtggttcgcccaccatggtcattacgccgcctaatgcggtgccgacaccggcatgcatcatcaggctacgcagaaagccacggaactgttccagaaccactttgtaatgcttgtcgatatgactatcgtcttgcaggtcggtgtcttcggtacgggaagaggctacgcggtgataaataccataaaaaccgactgcaacgctgatcaccaccgccacgacggttaaggcatcgaggaacgcggagaggaacgcagccgccacgcaaaaagagaggctcagcagcattttggagcgaatgcttaacagcaaacgggtaaatatgaacagcaacagctgtttcataaaatagatacccgccaccataaacatcagtaacagcaagacttcaagatttgccgccacctcttcacggacgtgttccgcgctggtcatgccgatgaataccgcttcgatagccaacagaccaccggggagcagcgggtagcatttcagggccatcgccagagtgaaaataaattccgctaccagcaaccagcccgcgacgaaagggctgatgaggaaaattaacgggtttacgattaagaaaatgatgagggcgagtttgtaccagtcgggggactggcccaaaaaattgcgccatagcgcgcggccccaggagatctccatgatggtttcccttaccttacaaataatcaatgatgtttttatgtttaaacgcaaagcttaacggtcaggcaggagtgaggcaagtcttgatagtcaaggggaaagagatgcggaaaatgaagccttgatccctttttcttctttttgtctgctatcagcgtagttagccctctggtatgatgagtccaactttgttttgctgtgttatggaaatctcactatggtcattaaggcgcaaagcccggcgggtttcgcggaagagtacattattgaaagtatctggaataaccgcttccctcccgggactattttgcccgcagaacgtgaacttagtgaattaattggcgtaacgcgtactacgttacgtgaagtgttacagcgtctggcacgagatggctggttgaccattcaacatggtaagccgacgaaggtgaataatttctgggaaacttccggtttaaatatccttgaaacactggcgcgactggatcacgaaagtgtgccgcagcttattgataatttgctgagcgtgcgtaccaatatttccactatttttattcgcaccgcgtttcgtcagcatcccgataaagcgcaggaagtgctggctaccgctaatgaagtggccgatcacgccgatgcctttgccgagctggattacaacatattccgcggcctggcgtttgcttccggcaacccgatttacggtctgattcttaacgggatgaaagggctgtatacgcgtattggtcgtcactatttcgccaatccggaagcgcgcagtctggcgctgggcttctaccacaaactgagcgcgttgtgcagtgaaggcgcgcacgatcaggtgtacgaaacagtgcgtcgctatgggcatgagagtggcgagatttggcaccggatgcagaaaaatctgccgggtgatttagccattcaggggcgataatcccttccgtttaaagagcaaacccctcaaacgaggggttttttgttgtttttacagatttcccattcttggcgggcaacgttccagcaactcgatgctgccgtcttcgttttgctgttcgagcatcacatcaaatccccacaggcgatgcacatgcttcaggacttctttgcgcccccgatccagcggtgcgcgattatgtggaatataacgcagcgtcaggctacggtcgccgcgcaaatccacgttccagatctgaatattcggctccagattacttaagttatattggctgcttaaccggttacggatctcccgataaccttcttcattatgaatagcggaaatctccagataattatgccgatcgtcatccagcacggtgaagaagcggaaatcacgcatcactttcggactcaggaactggctgataaaactctcatctttgaaatcacgcatcgcgaaatgcagcgtttccagccagtcggaaccggcgatatccgggaaccagtatttgtcttcttccgttgggctctgacaaatccgtttaatatcctggaacatggcgaacccgagggcatacgggttgatgccgctgtaccacgggctgttataggggggctggaagaccacattggtgtggctgtgcaaaaactccagcataaaacgttccgttactttcccttcatcatacagatggttaaggatggtgtagtgccagaaggtcgcccagccttcgttcatcacctgagtctgtttttgcggataaaaatactggctcaccttacgcacaatacgcaggatttcacgctgccaactttccagcagtggcgcatttttctccataaaatagagcaggttttcttgtggttcggacggatagcggcgcgcttcagcaaccgttttctcttcctcgcgcttcggcagggtacgccagagcatattgacctgactttgcagatactcttcgcgacttttctgccgggctttctcttcttgcaggctgattttttgcgggcgtttgtaccggtccacgccgtagttcatcagcgcgtggcagctgtccagaagccgttctacttcatcaacgccataacgctcttcgcactcggtaatatatttacgggcaaaaatcagataatcgacaatgctactggcgtcggtccagctacggaataagtaattgtttttgaagaaagagttatgcccatagcaggcatgagccatcaccagcgcttgcatggtaatggtgttctcttccatcaggtaagcgatacacgggttagagttaatgacgatttcataggccagtccttgctgaccgtgcttatacagccgttcagtctcgataaactttttaccgaaactccagtgcggatagttaattggcatgccgacgctggagtaggcatccatcatctgttcactggttatcacttcaatctggtgcgggtaggtatccagccggtagagtttcgccacccggtctatctctgccagataaacatccagcaggtcgaacgtccagtcgggtccatcgctcaaacgtgtggtgtccttattcatagaatcgatcgtcgccatacgcgcacctcattgttgtcggcgctctctgtgtggagcacctcatttcaagcatagaacacctgttaaaaaccgcgtcgccggagaatttttttctttgcgatttcttattatcagagtgccactaatccgcttctgaacggaattttatgctggataaaaagggcgttcagcaggagatactaaagacgccatattgccgcagagtcagggagatgtgagccagctcaccataaaaaagccgcatgttgaataatattttcaactgagttatcaagatgtgattagattattattcttttactgtatctaccgttatcggagtggctatgcgagttgtcatactgggaagtggtgtggtaggcgttgccagcgcctggtacttaaatcaggcaggacatgaggtcaccgtcattgatcgggagccgggggccgccctggaaaccagtgccgcgaatgccgggcaaatctcccccggatatgctgcaccgtgggcggcaccaggtgtgcctttaaaagcgattaaatggatgttccagcgccatgcgccgctggcggttcgtctcgacggtacgcagttccagttgaaatggatgtggcaaatgttacgtaactgcgacaccagccactacatggaaaacaaagggcggatggtgcgtctggcggaatacagccgtgattgcctgaaagcattgcgcgccgaaaccaatattcagtatgaagggcgtcagggtgggacgctgcaactgttccgtaccgaacaacagtatgaaaatgcgacccgcgatatcgccgtgctggaagatgccggcgtaccgtatcagctgctggaatccagccgcctggcggaagtggagcccgcgctggcagaagtggcgcacaaactgacgggcggcctgcagttacccaatgatgaaaccggagactgtcagctatttacccagaatctggcgcggatggcggagcaggcgggggttaaattccgctttaatacgcccgttgaccaactgctttgcgacggcgagcaaatctacggcgtgaagtgtggcgatgaagtgattaaggccgatgcgtatgtgatggcgtttggttcttacagcacggcgatgctcaaaggcattgttgatattccggtgtatccgctgaaaggctacagcctgaccattccaattgcgcaggaagatggtgcgccggtatccaccattcttgatgaaacctacaaaatcgccattacccgtttcgataaccgcattcgtgttggcggaatggcggagattgttggttttaataccgagctgttgcaaccgcgtcgtgaaacgctggagatggtggttcgcgatctctatccacgcggcggtcatgtcgagcaggcgactttctggactggtctgcgcccgatgacgccagacggcacgccggttgtcgggcgtacacgctttaaaaatctgtggctgaataccggtcacggcacgctcggctggacgatggcttgcggttccggtcagttgttaagcgatctgctctctggtcgcacgccagcgatcccatatgaggatctaagcgtagcgcgctacagccgtggatttacgccaagtcgtccgggccatttacatggcgcacacagctaaggaaacgagatgacccgtccgatacaggccagcctcgatctgcaggcattaaaacagaatctgtccattgtccgccaggccgcgacgcacgcgcgcgtctggagcgtggtaaaagcgaacgcttacgggcatggtattgagcgtatctggagcgcgatcggggccaccgatggctttgcattgcttaacctggaagaggcaataacgttacgtgagcgcggctggaaaggaccgatcctgatgctggaaggatttttccatgctcaggatctggagatttatgaccagcaccgcctgaccacctgcgtacacagcaactggcagctcaaagcactgcaaaatgcgcggctaaaagcaccgttggatatttatcttaaagtgaacagtgggatgaatcggttgggcttccagcccgatcgcgtgcttaccgtctggcagcagttgcgggcaatggcgaatgttggcgaaatgaccctgatgagccattttgccgaagcggaacatcctgatggaatttccggcgcgatggcgcgtattgagcaggcggcggaggggctggagtgtcggcgtagcttgtccaatagcgcggcgactctgtggcacccggaagcgcattttgactgggttcggcctggcattattttgtatggcgctagcccgtccggtcagtggcgtgatatcgccaataccggattacgtccggtgatgacgctaagcagtgagattattggtgtccagacgctaaaagcgggcgagcgtgtgggctacggcggtcgctatactgcgcgcgatgaacagcgaatcggcattgtcgccgcagggtacgccgacggttatccgcgccacgcgcctaccggtacccctgttttagtggacggcgtgcgcaccatgacggtggggaccgtcagcatggatatgctagcggtcgatttaacgccttgcccgcaggcgggtattggtacgccggttgagctgtggggcaaggagatcaaaattgatgatgtcgccgccgctgccggaacggtgggctatgagttgatgtgcgcgctggcgctacgcgtcccggttgtgacggtgtaacttgttgtaagccggatcggaggcaacgtcttctgggtgcaaaaaaatcatccatccggctggtcagcaactgtagttgttaatgtgacagagccattgcccatgatagtgtccattaaaaggatggacactatttccccggaacctgaactcaccgcacaggcgttctacataaaacgcttacgcttcattgttgactcgaactcgacttcagataaatcacgctttacccttgatggagcctgtacatagatttgtgtaattgcctgattttgatatgttcaattcaacatcaaatgaaggttaaattatggacgacaaacaattgcaggctcaggctgcgttcagcaaagcatcgcaaccggcgatagatgcttcattaaatttaagattcagcttcctcttcagccacccgtacgccaatcttcaacacttcattatcttctttctcggccaccgtccagatcatcccggcaaactctacctggtcaccgacaaccggtgccgcgcctaacaactgctggacaatttcacccagcgtttgctgcttatcacgatattctcgcccgtcttccaggccatatatcagcgcaacatcagcatatttggcgctggcttcgagaatgaagtcaccaaagaagcgttgatccagcgcgaccggcgggctctggctgaacagtttaccgagcgccggaagatcgcgttcccgaccaattacacacaacacatcgccttcgcgcagtcgggtgctgccggtaggatgaagcaactggttatcacgaaacagtgccgcaatacgcgtctcttttggcatatgcaaatcgcgcagtgccgcgcccacgcaccatttatcggcactcaattgataaacaaactgctcccacggattttccggatgaatatccaggccaacgcgactcaccggacgtcccactggcggaaccaccactttggcttttttagccgcccagctgagacttgttccctgcaagagcagactaaccagaaccacaaagaaggcgacattaaagaacagacgtgcattctccagccccgccatcatcgggaacacggccaggatgattggcaccgcgccgcgtaatcctacccagctgataaacacgcgctcacgcagattgaaaccgcggaaggggagcaatccagcaaatacgctaaggggacgggcgaagaatatcatccatgcggacaaaatgagcgccggaatggcaataggcagcagatcgcttgggttaaccaacagccccagcaccaggaacatggcgatttgcgccagccaggcgaggccgtcgaaattttgcaggatgccgtagcggttgcgaatagggcgattacccagcagaaaaccgcacagatacaccgccagaataccgctaccttccagcgcagtagttaaactgaaaatcagaataccgccacttaatgccagcaatggatataatccggcgggcagggcgatgcggttgatcatttgcagtagtaaataaccgccgccaagacctattacaatgcccagaccaaattgttgcagaatatcgacaatgaacatccagctaatattgctctcatgatgctggatcatcgcaattagggtaatcgtcagaaagaccgccattggatcattactgccggattcaatttccagcgtgctgccaacacgttcgttaagccccttaccacccagcagagaaaagaccgctgcagcatcggtagagccgacgatagcgccgattaataagccttcaatcaaatcaagattaaacagccacgccgccatcatgccggttaaaccagaggtgataagcacgcccagcgtcgccaggctcagtgccggtcctaacgccacacgaaaggaactggcctgagtgcgcatcccgccgtcgagcaaaataatcgccagtgccaggttacttaccatgtaggcgaaggggtaattatcaaacgggataccgccgacgccatcgactcctgccagcatgccgatcgccagaaaaataaccagaataggaatgccaagacgggaagaaaaactactaagtaatatactgctggtgacaaggatggatcctaagatgaaaaggctaattattgttgtggcatccaacggtcggttactcctgattacgctgtctcttatataaaccctaccatattagcggcagagacagcgttttacttagccctgaagcgtgatttttttacattttaagaacaggatgaccgctaatcgtcaactgagtgccttcccgggtgttattcagaatggcatgtgcgcccaacggcagcgtaaccgtgcgttgttcatgaccaaaatcgaggccggtaatgagtggaatgctcaggcgggaacgcaaaaacgcgtacacactctccaggttgtaacctgcgtcataatcattgggcgtgctgccgctaaagctaccgagaataatcgccttctgacgtggcaaaattcccgcatgatagagctgcaacagcatacgttcgacccggaaagggtgctcgttaatatcttccagcaccagaataccgttctcaatttttggcatccacggtgtaccgatcagactaatcagcatcgcaagattgcctccccacaacgtgccttcggcccgacatgtcgggccttccccttgccattcaatggtgaaggtttcattgcgtaacgccagccagaaatggtgctcggtaaaggcgttcagttcatccgcgccaaagtttgctaccagcatggggccgctaaaggtgatgacattgccatgcgccagaagaccgcactgaatggcggtaaaatcgctatgtccgcaaatgagcaacgggtcatgttgttggcgagccaccagtgcctgccagtcaatatctgccagtaaacgactggcaccgtaaccgccgcgtacagccagcacgatggtgttgggggtagtcagtctggcaagggaattgagatcttccagacgctctgtttccgtacccgcaaaacgctcacaacgacgggcaataacctcgacgttattgacttgatgccccgcgtcggtaaggcgctggataccacgcagcgcggcgtgctgtttaatgcagtaaccgcttggggcaattaagtgaaacagagacatggcaattccttgctgacaacagaaacgaaatgtatatcatgccgcttaggtgtgccgttgtcacctcaacggcgattccaggctataaggatagaagaagtgaaattgagatggtttgcctttttgattgtgttattagcgggttgtagtagtaagcatgactatacgaacccgccgtggaacgcgaaagttccggtgcaacgtgcgatgcagtggatgccaataagccagaaagccggtgcagcctggggcgtcgatccacaattgatcacggcgattatcgctatcgaaagcggtggtaatccgaacgcggtgagtaaaagcaatgccattggtttgatgcagttaaaagctagtacctccggacgtgatgtttatcgccgtatgggctggagtggtgagccgacgaccagcgagctgaaaaatccagagcgtaatattagtatgggggcggcttacctgaatattctggaaaccggcccgctggcaggcattgaagatccgaaggtactgcaatatgcgctggtggtgagttacgctaacggggcaggtgcgctgctacggactttcagcagtgatcggaaaaaggcgatcagcaaaatcaacgatttggatgctgacgagttcctcgaacacgtagcgcgaaatcaccctgcgccgcaggctccgcgctatatctacaaacttgagcaggcactggacgcgatgtaaatcagtcgcgcactttgtccgctttttcccgggcttctcgctcgagagagaaaataatccgctgtaattgccgctccaccgtcgggctgacgttaagaaaacggaagctcagacggggagtggtgatggtttcattcttgccatcaatcactttgcgctcgctgatggagattaactgggcgtcaaagtgaaaaacaccccattgccccatgttgacttcaatctgagcgaagcgcatgccttcttgtaattcggcaggctttgctgtttccagtaatgcgcccatgccgcctaagctcaaatcatacaggcggaaacgtaacgtactgttatccgccagtttggtctggcaaaaataaggcggatggagtggggcggagatgcggaaatatcggcgtcgttgtacaaaccataaggtgggaggcggtacggtaataaatgccggaagctgcaagtattcactctgctgtagttgttcaacagtaaactcgactttcgcaccctgagtttcggcggtaatggtaatgtgctgtgcctttagcacggcgatgttgtcttcggcttgactgccgaaatccagcaccagtttatccggggttattgccagtaatttgctgatcagctgcccgccattccaactgagacgcaaaggaattgcggctttgtgcaaatcgcgtaacacgcccaggacggctaacggattttgtttcaggaactgctcatggtaatgactcacgcggaaaaactcctgactgacaaactgtctttggtttatcggtcacagttaacaaaacttaatacaaatgcgtgaatattttttacatgttgttcttaaatcagccgacatacgcccagcatcgatcccgcccttgcctatacttagagcgttgatgtaagcatttcttgcgtccgattcatcgaaacgagggcctgaacatgggaattattgcctggattatttttgacctgatagccggcattatcgccaagctaatcatgccggggcgtgatggtggtggatttttcctgacctgtattctcgggatagtcggtgcggtggtcggcggctggctggcgaccatgtttggcattggcggctccatcagtggttttaatctgcacagcttcctggtggcggtggtgggagctattctcgttctgggcatattccgcctcctgcgaagagaataagattttcataaggcggatagcgatacagatgccgctatccgctttcacatcagaacgtatactcgacacctgctttacgggtgaaaaaaatcaatatagcacttcgatatccgataaagtcggttcccggtaacaacaacagaatccttttttaattattgtttcgttgtttttggtgtgattcagaaaataaatattttagacagtagccagagtggcgttaaaaatggggcggatagtgaggcggttttggctgcgcttattgaacatttagaattgatcaatccttctggcagattaagccaaaatacccgtagcgcaatgcttcagttacgcgaagaggaatggtctgaattctttttttggttgctaaattctctggagtgtctggattatgtgattattaatttaactccagaaagcaaaaaaacgttgatgagtgaacaccgtaacaatattcaggtagcaattgatgctttatatagccaacgtcggcgtaaaagcccgggtgatgaaagtgaaacacttacccgtagaaatgacgctatcttcggcaaccacgtatggcaaacatttgcgcaatacttcccgccaggacttgaaaaaccgtctgtgtaaaaaaaaccatagctatggtgttatctgccgacaacgccatccggagaagccgaatgacgttgtcggagtaagcgctggttaaggtgtgggttgtgcctctttggtactgggttgcgtcgttgcactcttaacggtcggacgcgtcgccggaacattgtcacacggttgctctttcgggcagatcaaatccagcattttcagcgtcacgccattggtccagccaaagccatcctgtaatggatattcgccaccgccgccccccgttccggtggtgctgacatcatatttttccaccagctttttctcccggtcataggtgtgctgaacattggtcaggaagtgccagctaatgtccatcgccacctctttttgcccgtagttttgtaatccttctgtcgcgacccactgtaacggtgcccagccatttggcgcatcccattgttgcccacttttcacgctcgtggtgttcaggccgccgggttgcagcagatgtgttttcgtcgccgtcgccattttgttggcgcgatctttcgctgccgcattgacgtacagcgggaacagggcggccgcggttaactgattgcgcactttatgacttttcaggtcgtaatcggcataccagccttgttgatcgttccacaggtatttttcgatccctttttgacgggcatttgccagcgtttcgtactggtttgccatcgcgttatctccggcagctttgctggcgcgggcgaggattttttccattttaaacatcaggctgttcagatcgaccggtacgatgctggtggtgcgtaaggtatttaactgctgcgggttgtccatccagcggctgctgaaatcccagccagacgcagcggcagagcgcaggtcgcggtaaatttcagtggcaggtcgattcggattgcttttggcggtggcaatatcttccacccaactctctggtcgtggcgtatcgcgatcgtcccagtagcggttgagaagggtaccatcctgaagtttgacaacgcgtttttcctgttgtccggcttgcaggttttcaacaccgtccatccagtaagcatattctttttgcatttgcggcaggtattgcttcaacgcggcatcgccttcatgctgcgccagtaactctaccatcagggcaaagaagggcggttggctgcggcttaaatagtaactgcggttgccgttgggaatatgaccgtaagtgtctatttcatgagcaaaattggccaccatatccgcgactttatcccagtgaccgctttcggcaagtcctaacatggtgaagtaactgtcccagtaatatacctcgcgaaagcgtccgcccggcacgacataaggttccggcagcggtaacagagaatcccatttttcggtgttttcggtagaacgcgttaataccggccaaagtccgtcaatatgttcgcgcagactctgcccctctggcggaacatatttctcgccttctttcggcagggtgaaattgacgttaacgaaatggcgcagatcaaatccgctctggttttgctgcatccgataatcagcaaggatcatcagcggatcgctgttcggcacggcatcggcaaaggttttttggtccggaaaaagtttggcgttttgcacatcattaaacagcggccctaataaaatatcaggcggctgtggtgttaccggtgtttcttctgcctgcacgcttagcgcagcgaaacacaaaaagatacaggctggaattaacgccattttttgcgggcgagaaggtgcgggggatttcatcaatcattctcctttggcgaaaccgaataaaacggtattcaagtatcagaaaaccttagttcaggatcgcactagctgcatgatcgaaatctcattctgcgaactgtcaggcattttagaaaagggaattaaagggataaataacggcgaaatagagtgatcaaataacgtctgtttattagccagccagcggcgttgggttcgtgattagcgaagaaaaatcatcataaattggtgaaaaatataacaggtagttaaaaaccattagtgctgagtaaattgccggatgacatcagaacgatgccatccgaacagtggcttaaccctgacggttgaaacgttgcgttttaacgtccagcgttagcgtttcttctggttgtatcgcatacagtttctcaccctgctggcaaatccagccaatccccagttcacgggcgattagggcgctgtgggataccggacttccggcgctaaggcagataccttttacaaccgccggatccagttgcagtactgtggaaggataaatgttctccgccagtagaatagttgggctgttaaactgcgggagttcttctttcgtttgggtcaggtggaccagggtgcgatgcagaagatcgtccacatcaatatagcgagcttgtagatattcatcatccagttgctggtattgctggctaagttctttaagaacttgctgccaggcatattctgccgtgcaatgttcatgctgaaggagttcgcttgccgccgccagcagttccggatcatctaacagtgtatggtgaccagaaaagattgcggcaatatcgtcaagcccgctggcttctgctttcgctgttaacgtcatcagatctaataacgtgaagtcaatagcctggcgtaatcgatcttgttcttcttccacggtcagggtactttttgcctgtaccgtacataaaactggttgataataaaaggctttaccgctaacaggcggaacgggacgcagagtaggtggagcgacttcctccgtttcaccaaagttatcttcagccagctgacggaaagcgatcagtgcctcttcagcttctggccctttcgcaatcaggcgcagcgtatcgttatagcgaacttgtagtaacgcaatctggttaatactctctggtgtgacgcatttgccgtttttttccagcaacatatcggcattaaatgtgcttaaggtataaaccagccgggaggccggacgtacatgcaggccgttacggttttttatgaccaccgccagagaacgggcttcttcatcgtacgcaggacatgtgtcagagatttcagtgtcggaggacggtaaacccagttgttcacgtttggcttccagcgcatgcatggcgtcaaagataactttgtcgatatccgccccgctggccgcgctgaccgttgctgccagtgtaccttcgaccaacggcgcagcacacaaacgtacttttgcggcgatctcgggagccagcaattccagcgcagtttcagcactcaataatgcgctacccatatccatcatgaccagcacatggtcggcatcagcaacagattcgatggcctccatcactttgacggcatcggtaccaatgggattttgtggatcgtcaattcccgcggcaatggcgattttacaactatcactcattaacatctgacgggctaattcaccgacaccttctcccagtcggctgctatgactaactatgaccaggtttaccatcaccaattccttactcttttgcggctaacgccaacatttgcatcataaacatcacgctggtcgcgccgggatcctggtgaccaatactgcgttcaccgagataactggcgcggcctttgcgggcttgcatcgtaatcgtactttgtgcagcggattcggcgatgctactggcagcttcgagcgccaccggaacagagagattttgctcgctggactgacgtaagctttccaccaccggcacccacacatcacacatggttttatcgccaggttcggctttcccgcgactgattacgccgtccgcgccatcgcggaacatctgataaagctcttccagtgtcaggctttgccgtgcctgggtcgcctgtgcggcgcggataaagaaggtaccgaacagcggaccactggcaccaccgacgctggaaagcagcgtcataccggtattcttgagaatgaaaccgatatctttatctgcgatagcagggagtttttccaccactttgctaaagcctcggttcatatttagcccgtggtcagcatcgccaatttcgcgatccagtccggtaagatactcgctctcggtgctgaaaatatcgccacaacgagtgagccagttaacaatttgagttctgctcagactcattgctttctccttatttaccccagttaagggccggggtgtggaccggggcgtcccagagtgccagcgtttcgtcatcaactttcagtaaggtgatactgaaaccggtcatatccagactggtgcagtacgcgccaattaaattacgttcgatagtcaatcccgcttgctggcaacgtgtggtcaggcggttatagacgccgtacagctcagaaagcggagttgcgccaagattgttaaccagcgcaatcacccgatcgccagactggagcggttgtttggtttgttgttcttcctgccaactgccttgttgataatcccagaaacgcaaagtgcgatggtaactgccatttaccagcagggtgtcgaacatttcatcgacggtttgatcaagggaagagaaggggcggcggtcaatacccggctcaccatgaatgccgacgccaaactccatctcattatccgccagggtaaaagaaggtttgcccgcggcaggaacggtacaggcaccgagagcgatacctatactgtggccttgattattcagcttacgccccagttccgcacaggcgtccagactgtcgccacgctccgccgctgcgcctacgagtttttcaattaatacggtgttggcaacgccgcgtcgcccggcagtataaagactgtcttttaccgcaacgtcgtcatcaatgaccacagtggtcacttttacgccgctatcgtgcagtaactcggtcgctgtttcaaagttaagaatatcgccggtgtaatttttgataatcaacagtacaccttcgccgccatcaacttgcatggcgcattcaaagattttatcgggcgtcggactggtgaaaatttcgcccggacaggccccgctaagcatcccctgaccgatataaccacagtgcatcggctcgtgtccgctgccgccaccgctcagcagggcgacttttcctgcaacaggggcatcagctcgggtgacatacaccggatcctgatgcagtgtcaggcttggatgcgctttcgccagtcctgccagttgttcgtccagtacgtcttgcacatcattgatcaattttttcattattttgctccagcaattacggtagggcatggatgatgttcaacgacacggcgaccactgactgccgatgaatccattgtgcatcaggcaagggaaaagaaaattagcccaaattatgtttcatagtgaaacatatgctttaatgaatgttccatattgaaacttttacgtgtattaatacttaaaattgcgagccggaacaccttttgtcataagggatgcgggatatgagtggcgcttttaacaacgatggtcggggcatatctcccttaattgcaacctcctgggagcgatgcaataagctgatgaaacgggagacatggaacgtaccacatcaggcccagggcgtgacatttgcttctatttatcggcgtaagaaagcgatgctgacgctcgggcaggctgcgctggaagatgcctgggaatatatggcaccgcgagagtgtgcgctgtttatcctcgatgaaaccgcctgcattctcagccgtaatggcgatccgcaaaccttgcagcagctaagtgcactgggattcaatgacggcacgtattgcgccgagggaattattggtacttgtgcgctaagcttagcggctatctctggtcaggccgtgaaaacgatggccgatcaacatttcaaacaggtactctggaactgggccttttgtgcaacgccgttgtttgacagcaagggccgattgacgggaacaatagcgctggcgtgtccggttgagcaaactaccgcagctgatttgccgttgacgttggcaatcgcccgcgaggtcggaaatttactgctgacggacagtttgctcgctgaaactaaccgtcatttaaatcaacttaatgccctgttagaaagtatggatgatggcgtgattagctgggacgagcagggtaatttgcaatttattaatgcccaggcggcgcgggtcttgcgccttgacgcgacggcaagtcagggacgggcaatcactgaactcttaacgttacccgccgtattgcaacaagcaataaaacaggcacatccgctcaaacacgtagaagcaacctttgaaagccagcaccagtttattgatgcggtgataacccttaaaccgataatagaaacgcagggaaccagctttattttgttgctccatcctgtggaacagatgcggcagttgatgaccagtcaattaggaaaagtcagccataccttcgctcatatgccacaggacgatccgcaaacccgccgcttgattcattttggtcgccaggcggcgcgcagtagctttcctgtcctgctttgtggagaagagggcgtgggcaaggcactgctaagtcaggcaattcataatgaaagcgagcgtgctgcaggtccttatatcgccgtcaattgtgagttatatggtgatgctgcgctggcggaagaatttattggtggcgatcgcacggacaatgaaaatggccgtctgagtcggctggaactggcacacggcggcacgctgtttcttgaaaagattgaatatctggcggtggagttacagtctgctttgcttcaggttatcaagcagggggttatcacgcgactggatgcgcggcgtttaataccaattgatgtcaaagtgattgcaacaacgaccgcggacctcgcaatgctggtggaacaaaatcgttttagtcgccagctgtattacgcgctgcatgcatttgaaattaccatcccgcctctgcgtatgcggcgtggcagcattccggcgctggtgaataacaaattacgcagtcttgaaaaacgcttctctacgcggctgaaaattgatgacgatgccctcgctcgcctggtttcttgtgcatggccaggcaacgattttgaactttacagcgtcatcgagaatcttgctctgagtagtgataacgggcgcattcgcgtcagtgatttgccggaacatctgtttaccgagcaggcgacagatgatgtcagcgccacccgcctttccaccagtctgagttttgcggaagttgaaaaagaggcaattattaacgcagcccaggtcacaggcggtcgcattcaggaaatgagcgctttacttgggatcggccgcactacgctgtggcggaaaatgaagcaacatggcattgatgcagggcagtttaagcgccgggtatgaaagacagaaacgatttctgatacatcagagtgatctgtatttcattccggcgcacgctaacaattttcagcatcgtttaagggcttgtctatcccgcacttaaaagctgaagcgatatcctccgttgacttgcttctgatcaaagaggttaccctgcgtgtaatccgcttcgagatagaatgtgtgctgtttgttatactgtgcactgactcccacgccgttattccagccattacctttgaaactgtacttctcccgggagttgttcaacagatattcggtatccccactaaactcgcggatagcgccagtcttcacatagacattcagctggctgttgcctgcggtgatgtcataccccagtatcatgctggcacgccccagcaggctttcgtagtgattcagatgtatattgaggccattactcgccttcatagtcatctcattctggtggctgtatgtaagctgggtttgcggctctatatagaacccataaccagtaggggacaggttgaacctctgcccggcttccagggagatgctcattccattcgcagtgccgttggcgttaacgccgttgttctgactgtccagtacgtggaaactatttttctggcggcttgcttttataacgagatcgctgtaaaaaccgttttgtgccatgtaactggcgtacattcccatgtagtcactacgtgcggtaccgtcgcctccgctatagtccgggcttgcatgtgtactgccaatatacagaccgacatacaacggcattacatcagagagacgtttatccccaccaaactggataccgctgtaacccatgtcaaagccgctcagtttgccactggcaaaggagtccaggcttcccccataactgcgcaaccagatattaccgtctttactctgatttcgcaggtcacccatccgttgcatcagcgtacggttttcaacatagttcaataagtaaccgacattgagataattgccgccagcatctgcggtcgtggtgggtttaggcgtgggagcgggttcaggcgtaggatcggggttgactatgggaggctgagcgggagctggtgtgggttcaggattaggagtcggttccggaactgtcccggaagcgtaaagctcccagttagtgccatttttacgcacatcgtacagatatccccccaactcaacctgagaagacgcgctgaagctggccgcgccgtcagtggtttttaccactgtcagaacttcatttcccgttgtggcctcgctgccctggttgcggatagccaatacgtgattaccagcactactcccgctgatattcaataaatcccctttattattaacgccattaccctcgccaacaacatcagcacgcataataaaggtactgttaccgctcaggttctctacgtttaatgtggcaaatgtgccggcagtactcccgtggctggcaaaatcgacagtactatggctcagcgccagcgtgtcgagattagaattacttgttacgttccagacgctgttattcattgcaacgtccagttttccgccattgacattatcgctgagggaggaacctgtccaaacgttcccagggtgcatatccagattgattagcccacctttggaaagaacgctaccgttgataagcatacgaccgctggcgttgatgcggctggcggcataaccatcgtcatgttgcgttgcgatggccatctggtcgggtgtactcatatcaatgaccagatcgctcgtgaggtcgatctggctgttggtcatggcataaattcccctggctcctgccgcgccggtgatagccaaactgtctccggttattctaccgccgctgagagcccacaaacccagcgccagactgccattacgatcaactgtaatatcggtattttgcatgttgacaacagccgttgccgtctgggcgctggcaccataagaaccgccggaaaagatgctgtttcgttgcgctgccgtgccagtaaaattgattatcgcgtcactaccactggtgacgaggccaccgccctgcgcggaagaaatatggctatctgcaccgatagtggttgtaccaccacgaacttcgacgccattggccgcggctccagttacatcaacagtgagtgcattcgcgctaacctggccaaagctccagaggccgtgagcattatcgccattggttttaatggtactgtttgttccgagatcgacaacagagtttttctgtacgtttatccccatggcgctgtagccctgaacatcgattgtcaggtctgtagccgtaaaacgcgcagcaccattggcgttattgccgttgagaccaccgatataaacacctgtacttccatcggtcgtgattttacttccgcttccaagatcgacactggtgccatagtcattgatggttaggcctataccgttgctgttttcaatggtgaattgagtggctgttagtgtactgctatgcccaataatgatgccgtcatcgttactcttaatggtgctgcctgtgcctaagtcagcatgggtatagtcaccaattaagttaatgccgatggcagaggtttgaccaacaacatctactgtgagtcggttagctgtcagggagctgtttttgccctgaataatgattccttttgcatatccagaggcgtcgttgacattgacggtgacatcattacccaggttgatattgccaggcgtgtttcctgctggggtcattacaccatagaggtttccacttggatcggcggtatctcctgtaattctgtcaccatcattaatagtaatattggtgccatattgacttcctgtatcagcagctatcagcaggggggaaaagataattgcattcaaaccaatagcgccaaattttatcagttgaatactggggctacggatttttaattcagcgagacgatctgctttggtattcccattgtgttgtttgatgcccataccactcctatatagtacccagactatgggtctatggattttgtcattttgtttaaatcaatgaataatatcctcttatcatcatgatatttgtatggtgcaatcatgatgagcttctcagagaataattctctattaccgggcaaaatcaggaacacaggaattaatatatatttaacatcccccttacaaaggtgagtttatatcgagttattccctaagttgtcgttacttattccaattcgttactataaatatggcaaaaatattacaacaaacagcggttaaaaaatttggtgaagattttttgtaataatcctaattagttatgggaatttcgcttgatgtatctgcataacaaaaacaatatgcgccatttttgcattactaataagaaaaagcaaaaaacatcgatattcatttttggtcaatgggttttctggcctatcgttgttattgtgctactggttatcattttcatcttgccagcatattggagcgtgatcaattttgatcagctgtgaagggggctgatgtgtagtgatacaaaaacttacgttatatcactgctaatgagatatccggcatctgaacacttatgtctttaattattctcgtggttcactataggcaataagcacaaaagtgtaggatgttacaagaatgattaggactcggtgaaatgaaaaatccacgcaattgcgtggattttatatacttttgcgctcttcatgagatttagcgaaacctcatgagacaataaattaattagacgttgaaaaggaagttcatcacatcgccatctttcacgatgtaatctttaccttctgcacgcattttgcctgcttctttcgcgccttgttcacctttgtaagtgatgaaatcttcaaagctgatggtttgtgcacggataaagcctttttcaaaatcagtatggattttgcccgctgcctgcggcgcggttgctccaaccggaatggtccatgcacgcacttctttcaccccagcggtgaagtaagtttgcaggttcagcagtttataaccggcacggatcacacggttcaggcccggctcttccagcccaagctcctgcataaactcgtcacgttcttcgtcgtccagttcggcaatgtctgcttcaacagcagcacaaaccggaaccacaacagaaccttctttcgccgcgatttcacgcacctggtcaagatatgggttgttttcaaaaccgtcttcgttgacgttggcgatgtacattgttggtttcagcgtcaggaagctcaggtaacgaatagccgctttctcttcagcgcttaaatccagcgcgcgcagcatacctgcattttccaactggggcaggcatttttccaggaccgccagctcagctttcgcgtctttatcgccacctttggctttcttctgtacgcgatgaatcgcacgttcgcaggtgtcgaggtctgccagcgccagttcggtgttgataacttcaatatcgtcagccgggttaactttgccggaaacgtgaatgatgttgtcattttcaaagcagcgaacaacgtgaccgatcgcttcggtttcacggatgttggtcaggaactggttacccagaccttcgcctttgcttgcgccttttaccagaccggcgatatcgacaaattccatggtcgtgggaagcgtacgctgcggttttacgatttcagccagttgatccaggcgaggatcaggcattggtacgacgcctgtgttcggctcaatggtgcagaatggaaagttggccgcttcaataccggctttggtcagcgcgttgaacagggtagatttcccgacgttgggcaaaccgacgataccgcatttgaatcccatgatttaaatcaccttaatatcttaataatcaacctgttattgctaacagattgcagaaatggaaataactttgcctattatacacggcactcggcaaaaatgccgcagacaacgacttattgcgctttaaaggcgtgcaatcggttcgttgctttggtcaagccatctgtaaaccacatttcagtacaacgcgccgcttcgtcaatggcttcatcaattaacttctgttcactaacaggcggtttgcctaacacaaaaccgacaactttatttttatcgcccggatgaccgattccgatgcgtaaacggtgaaagttagggttattacccaatttactgatgatgtctttcagtccattgtgaccaccatggccaccgcccaatttaaatttggcgacgccaggaggcagatccagttcgtcgtgggccaccagaatttcgtccggattaatgcggaaaaaactggccatcgccgcaacggctttgccgctgagattcataaatgtagtcgggactaacaggcggacatcttcgcctccaagagtgactcggctagtataaccaaagaatttagcctcttcgcgcagcggagcgcgcaaacgctctgccagtaagtcaacgaaccaggtaccagcattatgtcgcgttgcggcgtattcagcaccggggttcgccaggccgacaatcaatttaatcgtcacgtttttttgtcctgagtgtgtacataactggcgcgtagtttactggttgcggccccgcttgacaaaaaactgcgtatcaaatgcagataacgtaataattgcctgagtggactattagaaagtcaaggtgttcaggcgtttatttgtaaagttttgttgaaataagggttgtaattgtgatcacgcccgcacataacccactgggtgttgtctatactttacacataaggaagaggggtattccctgttacaacccagaaagttccggaggtgacatatgaaacgcaaaaacgctagcttactcggtaacgtgctcatggggttgggtctggtggtaatggtggtcggcgtggggtatagtatcctcaaccagttaccacagtttaatatgccccagtatttcgcacatggtgcagtgctaagtattttcgtcggtgccattctctggctggcgggtgcccgtgttggcgggcatgaacaggtgtgcgaccgttactggtgggttcgccactatgacaaacgttgccgccgtagcgataatcgccgtcatagctaacaaataatgcagtttgctgaccagtcagtttgcgctgactggtcaatctcgtacttataaatccgccatcgccgcgcgacgattcgggaagaacgccaggcgtcccgggatcggttgaatgccagcgcgagccatagtgcgcagtggctggaattccacgttgcacacgcgcagttcacatccctcgggcagacgcttcacaaaacgctggaacgcatcaagaccaccagcatcaagtaccggaacggcatcccacttcagaatcacaatccgtttgccttcaagacgactctccaggtccgtgaataagccttcagcagcagcaaaaaacagcgggccaataacgcgcagaaccaggacatcgtctggaacatctacgactaccggtgccaggcgagtcatacgtgcgatacgacgcataaacagcaggcttgccagcacgatccccacgctgatggcaataaccatatcaaacaacacggtcaggctcatgcacagcagcatgacgatgatgtcatctttcggcgcatgacgcagcaagtcgaccactttgtgcgcttcactcatgttccacgccaccatcaacagcagggctgccatggcggaaagcggcagccaggagagcagcggtgccagtaccagcagggcaagaataaccagaatagagtggatcaccgcgctgataggggacgttgccccggcacggacgttagcggcagaacgcgcgatggcagctgtagcggtaataccaccaaagaacggagcgataatattccccagtccctgtccaaccagttcgctgttcgccttgtgtttcgtcccggtcataccatccagcaccacggcgcagagcagagattcgattgcgccgagcattgccatactgaatgccgcaggcagcagtgtgcgaatagaatcccaggttagcgtgaattcactattaggcagatcccacggcagcaccagttgcggcagcagttgcggaataccgttaccctgagaaccatcggccaggacgtagtggaattggctaccgatggtagcaacatgtccgccgagcaggttaacaatccccatcaccgcgcaaccagccagcaaggccggaaggtgaccgggtaaacgaatgcccagacgcggccaaaaaacaagaatacctagcgtcacaatgccaatggcagcatcacccacattaatggtcggcagcgccataaataatgcgccgactttttgtagataatgttccgggacatgggccatttgcagaccgagaaaatctttaatctgcatggtaccgatggtgatcccgataccgctggtgaaacctaaggtgacggaaaccggaatatactcaatcaggcgaccaaagcgtgccagacccatcagaatcaaaaagatcccgctcagcaaggtcgcaaccagcagtcctgccagtccaaactgttggctcacgggatagagaattaccacaaatgccgcagtcggaccggaaacgctaaagcgactcccacccgtcagagcaatgacaatccccgcaacagctgcggtatataaaccgtactggggtgccacaccactaccaatagccaacgccatcgccagcgggatagcaataatcccgacggttatcccggcaatcaggtcacgggtaaaccgtgcggcagtatatttttctttccagcaagcgtcgatcagagcgcggaaaggcatcacatgactggaaaatattttgttcacaataatgtttcatccgtgagcgcatcatctgtcaactaaatggcaggtgaaggaggcataggtcatacaaatggatattacagacaaaaaaacccgccgcagcgggtctttgagccgggttcgattagtgttcgaacatggcagagatgctttcttcgttgctgatacgacgaatcgcttcggccagcataccactcagggtcagagtacgcacgttcggcagacttttgatttcatcgctcagcggaatggtatcgcagacaacgacttcatcaattacagagttacgcaggttgttcgccgcgttgccagagaagatcgggtgagtcgcgtacgcaaatacacgtttagcaccacgttctttcagagcttcagcagctttacacagcgtaccgccagtgtcgatcatatcatcgaccagtacgcagtcacgacctgcaacgtcaccgatgatatgcatcacctgactaacgttcgcacgcggacgacgtttgtcgatgattgccatatcggtatcgttcagcagcttagcgatagcgcgggcacgcacaacgccgccgatgtccggagaaaccacaattgggttatccagattcagctgcagcatgtcttccagcaggatcgggctaccaaatacgttatcaaccggaacgtcgaagaaaccctgaatctgttcagcgtgcagatccactgtcagcacacggtcaacaccgacgctggagaggaagtctgcaaccactttcgcagtgattggtacacgagcggaacggacgcgacggtcctggcgcgcatagccaaagtaggggataacagcggtgatacgacctgcggaagcacgacgcagggcatcaaccataacgactaattccatcaggttgtcgttagtaggggcacaagtggactggatgatgaaaatatcaccaccgcgtacattttcattaatttgtacgctgacttcgccatcgctaaagcgacctacagcggcgtcgccgagactagtgtacaggcggttggcaatacgttgtgctagttccggggtggcgttaccagcaaaaagcttcatatcaggcacgagaagaacctcaggcatgcgtccattggtggaaagaatctgccgaaaactgtgcgggccaggcatgatcctttccaggcggtgtattaaagagcgcgatgcaacgtctggaacaaggtgacgttgtcaccgaaactcagcttgcccggcttaaagcatggctctgtgcaatggggaaagattagcgcctttcgccacaaagccattgagccattccggggcttgctctagcacctggcgggcttcagactctgtatcaaattcagcaaagacacaggcccctgtcccagtcaggcggctcggggcgtattctaacagccaggaaagcaccgcatcaacctcgcgaaaacgttttcttgcgataacctcgcaatcattgctgaattcacattttagcaacgtttctatactcctttttggcgtattgcgcgggagttcaggatctttaaaaatcaccggagtcggaatacttacaccagggtgcgccaccagataccacttctctggcggatccaccggcgttagtatttcaccaacgccttcggcaaacgcggcatgcccccgaacaaagacaggaacatctgcgcccagcgtcagccccatttccgccagctcatccatgcttagcccgcattgccagagatgatttaatgccaccaggaccgtcgcggcattggaactaccaccgccgagaccgccgcccatcggcaaacgcttgtcaatgctgatattcgcaccgcttcccgtcggaagacgcccgctgtctgccgcagttttcatcaacaatcgcgctgcgcgaacgatcaggttatcttcatgttccacgccttcaacgggcgttaacagacgaatatccccatcgtcacgaagctcaatgctgatggtgtcgccgtaatcaagaaactgaaacagcgtttgcagcgtgtggtaaccatccgcacgctgaccggtaatgtataaaaacagattaagttttgccggagagggccactgtgtccgcattatttcactatccagttatccatttttaacttgatgcgttgaccaccgtcggtgagttccatattggctggcatcgcaggttgcgttttggtgtcataaccaccataaacaaccttccagtttttgccattctggctgtaggtaatttcgctcaggcggtactggtcgtccagtttgtagtcggttgcatcacccggtaaacctaaaatccactggcgcaagctgttgagcggaattggcattccggtcaatttgccaatcatctcttcggcgtcatcggcggtataacgctgacctttattgtcgactaactgcacgttacccggttgagcattcagctccagttccgtgctgcccaatgggttagtgagcagcagacggtagcgatcctggccggtttgctgccagaaaaagcgggcgtacactttttgttggtcagaaatataagcgaacgcgccgcgagtctgatactgattaagattgcgcacgtcttgctgatgctgacgccattgtgggctatccgggcttttgccaggacctttgggcgtggtaacggaacaggcagtgagcacaagagcagccagcggtagcaggcggataagacgaaaatcgggcaggggcatagtgatgacaagtccttgagatacgttgcagttataacccttaatgctagcgttaccgtccgctatcgtctatgttcaagttgtcttaattgccagaatctaacggctttcggcaattactccaaaagggggcgctctcttttattgatcttacgcatcctgtatgatgcaagcagactaaccctatcaacgttggtattatttcccgcagacatgacccttttagcactcggtatcaaccataaaacggcacctgtaagcctgcgagaacgtgtaagctttagcccggataagctcgatcaggcgcttgacagcctgcttgcgcagccgatggtgcagggcggcgtggtgctgagcacgtgcaaccgcacggaactttatcttagcgttgaagagcaggacaacctgcaagaggcgttaatccgctggctttgcgattatcacaatcttaatgaagaagatctgcgtaaaagcctctactggcatcaggataacgacgcggttagccatttaatgcgtgttgccagcggcctggatagtctggttctgggggagccgcagatcctcggtcaggttaaaaaagcgtttgccgatagccaaaaaggtcatatgaaggccagcgaactggaacgcatgttccagaaatctttctctgtcgcgaaacgcgttcgcactgaaacagatatcggtgccagcgctgtgtctgtcgcttttgcggcttgtacgctggcgcggcagatctttgaaagcctctctacggtcacagtgttgctggtaggcgcgggcgaaactatcgagctggtggcgcgtcatctgcgcgaacacaaagtacagaagatgattatcgccaaccgcactcgcgaacgtgcccaaattctggcagatgaagtcggcgcggaagtgattgccctgagtgatatcgacgaacgtctgcgcgaagccgatatcatcatcagttccaccgccagcccgttaccgattatcgggaaaggcatggtggagcgcgcattaaaaagccgtcgcaaccaaccaatgctgttggtggatattgccgttccgcgcgatgttgagccggaagttggcaaactggcgaatgcttatctttatagcgttgatgatctgcaaagcatcattagccacaacctggcgcagcgtaaagccgcagcggttgaggcggaaactattgtcgctcaggaaaccagcgaatttatggcgtggctgcgagcacaaagcgccagcgaaaccattcgcgagtatcgcagccaggcagagcaagttcgcgatgagttaaccgccaaagcgttagcggcccttgagcagggcggcgacgcgcaagccattatgcaggatctggcatggaaactgactaaccgcttgatccatgcgccaacgaaaagtcttcaacaggccgcccgtgacggggataacgaacgcctgaatattctgcgcgacagcctcgggctggagtaacagtacatcattttctttttttacagggtggaggaggaataatggaatatcaacactggttacgtgaagcaataagccaacttcaggcgagcgaaagcccgcggcgtgatgctgaaatcctgctggagcatgttaccggcagagggcgtacttttattctcgcctttggtgaaacgcagctgactgacgaacaatgtcagcaacttgatgcgctactgacacgtcgtcgcgatggtgaacccattgctcatttaaccggggtgcgagaattctggagcttgccgttatttgttagcccagcgaccttaattccgcgcccggatacggagtgtctggtggagcaggcactggcgcggttgcctgaacaaccttgccgtattctcgatctcgggacgggtaccggggcgattgcgcttgcgctggctagcgagcgcccggactgcgaaattatcgctgtagatcgtatgcctgatgctgtctccctggcacaacgtaatgcccagcatctggcgatcaaaaatatccacattctgcaaagcgactggtttagcgcgctagccgggcagcagtttgcgatgattgtcagcaatccgccgtatattgacgagcaggaccctcatcttcaacaaggcgatgtccgctttgagccgctcactgcgctggttgcggcagacagtggaatggcagacatcgtgcatatcatcgaacagagccgtaacgcgctggtatccggcggctttctgcttctggaacatggctggcagcagggcgaagcggtgcgacaagcatttatcctcgcggggtatcatgacgtcgaaacctgccgtgactatggtgataacgagcgcgtaacgctcggccgctattatcaatgacaagtttttctacactgcttagtgctcatcttattagtatcgcgctttctgttgggctattaaccttacgtttctggctacgttatcagaagcatccacaggcatttgctcgctggacgcgcattgtgccgccggttgtcgatacgctgttactgttaagcggcattgcgttgatggctaaagcgcacatcctgccattttccgggcaggcacagtggctgactgaaaagctgtttggagttatcatttatatcgttttgggttttattgcactcgattatcgtcgtatgcacagtcagcaggcgcgcattattgccttcccgctggcgttggtggtgctgtacatcatcattaaactcgccaccacaaaagtaccgttactggggtaagtcatgagaagcttagctgatttcgaatttaataaagcgccattgtgcgaaggcatgatcctggcttgcgaagcaatccgccgcgattttcccagccaagatgtttacgacgaactggagcgtctcgttagtctggcgaaggaagaaatcagccagcttctgcctttagaagagcagttggaaaaactgatcgcgctgttttacggcgactggggatttaaagccagtcgcggtgtttatcgtctttccgatgcattatggctggaccaggtgttaaagaatcgacagggcagtgcggtaagtttaggtgcggttttattatgggtcgcgaatcgtctcgatttgccgctgctgccggtgattttccctacgcagctgatattgcgcattgaatgtccggatggcgaaatttggctgattaatccttttaacggtgaaagcttaagcgaacatatgctggacgtatggttaaagggaaatatcagcccgagcgcggaactgttttatgaagaccttgatgaagctgataacattgaggtaatccgcaaattgctggatacactcaaagccagcttgatggaagaaaatcagatggagctggcgttacgcaccagcgaagctttattacaattcaaccctgaagatccctatgaaattcgcgatcgcgggttgatttatgcgcaactggattgcgaacacgttgcgttgaacgatttaagttatttcgttgaacagtgtccggaagacccgatcagcgaaatgatccgtgcgcaaataaataacatcgcgcataaacatattgtgctgcattaattaatcgacattttactcaagattaaggcgatcctatgaaacaaaaagtggttagcattggcgacatcaacgtagcaaatgacctgccgttcgtactgtttggcggtatgaacgtgttggaatctcgcgatctggcgatgcgcatttgcgagcactacgtaactgtgacccagaaactgggtatcccttacgtgttcaaagcctcttttgacaaagccaaccgctcctccatccactcttatcgtggaccgggcctggaagaagggatgaaaatcttccaggagttgaagcagacttttggcgtgaaaattatcaccgacgttcacgaaccaagtcaggcacagcccgttgctgatgtcgtggatgtgattcagttgccggcgtttcttgctcgccagactgacctggttgaagccatggcgaaaaccggtgcggtaattaacgtcaagaaaccacagtttgtcagcccgggacagatgggtaatatcgttgataaattcaaagaaggcggcaacgaaaaagtgattctttgcgatcgcggtgctaacttcggctatgacaacctggttgtcgatatgctgggcttcagcattatgaagaaagtgtctggtaacagcccggtgattttcgacgtgacccacgcactgcaatgccgcgatccgtttggcgcagcttccggtggtcgtcgtgctcaggtggctgagctggcacgagccggtatggcggtaggtctggcggggctgtttattgaagcgcatccggatccggaacatgcgaaatgtgatggtccatccgcgctgccgctggctaaactggaaccgttcctcaagcagatgaaagcgattgatgatctggtgaaaggtttcgaagaactggataccagcaagtaatcttttttgcttgaaaaataaagtattagcgttctgcgttaagacttttttcatgggtgccggatacaaaaaaggccgcaggctgttacccctgcggccggtttcgggcgcatattgccatcacggcagcctgacgcccgttttcaccttacttccggttacgccaccagctgacaatcgctgcggtaataattcccgccaggatcggtgctgccaggtcgtgccagaaaatcatggcaaactgcgcgagcgtcatatagccgccttgttgtaatgacaacattttgcggctattcttgaattgttctggttcaagattagcccccgttctgttgtcaggttgtacctctcaacgtgcgggggttttctctttccagcaaccaatgccaccagggataaagcccccgcaacattgcgcctcaccggataacgccggcttggtgtggatactacgactcaattcatcttcacttcatccctgaaatgtttgcaatgaagagtgcattccggtttttcaacagctgttacagtcatttcatgagtgctctggatgaggcttccagctcgggttgccaatatttacttgtggaagtgataaagacaaaaatggccgcaggctgttacccctgcggccggtttcgggcgcatattgccatcacggcagcctgacgcccgttttcaccttacttccggttacgccaccagccgacaatcgctgcggtaataattcccgccaggatcggtgccgccaggtcgtgccagaaagtcatggcaaactgcgcgagcgtcatatagccgccttgttgtaatgacaacattttgcggctattcttgaagtgtctggtttcaagattagcccccgttctgttgtcaggttttacctctcaacgtgcgggggttttctctttccagcaaccaatgccaccagggataaagcccccgcaacattgcgcctcaccggataattccggcttggtgtggatactacgtctcaattcatcttcacttcatccctgaaatgtttgcaataaagagtacattccggcttttcaacagctgttgcagtcgtttcatgagtgctctggatgatgcttccagctcgggttgccaatatttacttgtggaagagataaagacaaaaatggccgcaggctgttacccctgcggccggtttcgggcgcatattgccatcacggcagcctgacgcccgttttcaccttacttccggttacgccaccagctgacaatcgctgcggtaataattcccgccaggatcggtgctgccaggtcgtgccagaaaatcatggcaaactgcgcgagcgtcatatagccgccttgttgtaatgacaacattttgcggctattcttgaagtgtctggtttcaagattagcccccgttttgttgtcaggttttacctctcaacgtgcgggggttttctctttccagcaaccaatgccaccagggataaagccccgcaacattgcgcctcaccggataacgccggcttggtgtggatactacgtcgcaattcatcttcacttcatccctgaaatgtttgcaatgaagagtacattccggcttttcaacagctgttgcagtggtttcgtgcagggtgtggtacaggctcgcaattctgattaacgacctgtccaggtagtatgaagaaatacaataagcaggaatttatattatctcccccgattaccgtcatcggaggagatataactgtcaggcaaatatcgtcatcaaataggcggcaaacagtgccagatgcgctgcgccattgagcatgttagtacgtccggtggagaaggagatatggcacagcactaaagaggccaccatcaccaccatttctggcgcaccaagtgcaaactgcaattcgttacccgtcataaaggcaattagcgtgacgacaggtacggtaaggctaatggttgctaacacactaccaaagaacagattcatcgcgcgctgaacctggttgttcaacactgcttttaatgcacctaaaccttccgggctcagaatcaacagtgccaccaggaagccagtaaaggcgacaggggcattcatgctgtcgagcaatgtctccaggctgctggcgttcattttggtcaccgcaataacggcaatcagatggataatcaaccagatagcatgccacaggctgctatgggcagacggtttaccgtgatgcgggtcgtcatcatcactgtcatcttcgtgctcgtagacaaacaaactttgatgcgttttggtctggatcagcaaaaatacgccatacattgccgcagaaattaatgctaccagtaacgcctgaccggtactaaaattcgccgcaggcagagccattggaaataccagtacgattatcgccagggggaacagcgcaattaaatactgcttgataccaaacagattcatatattgggtggcaaacttacgaccgcccaacaataaactaaagccaaccagcccaccggtaacaatcataatgatactatagagcgtatcacgcattagcgttggcgcggcgtcgccggttgccattaaagcactaatcaaactgacttcaagaataaccacactaaggctaagaataaggctaccgtaaggttctcccaggcgatgggctaatacgtccgcatgacggacaacactaaaggcgctacttaaaataccaataagcgcaagaagattgatggcaatgaccactggtagtgtctggctgcttccccacaggaacagcactaccagcgccagaaccgggaaaataaggctagtctccttgtggcgggtttttaccgcctcttgagcattactcattatggttatccctttgcagatgaatttatcgaaaatgtaaaaaataggtaggaaaaataacagaaagtgtctggatatcggtaacattttacgaatttttaccccgctgtcgattttttactcattggggcataaaaataagtattacgtttagacaatgtttgttttagcgtctcttaagaagagtctgacctgaaaattcttatgttttggcaagagtagatattgttgaccacacttaatgttcaactttgtaaaaggagtcaacgatgccgtataaaacgaaaagcgatctgccggaaagcgtaaagcacgttctaccgtctcatgcccaggatatctataaagaagcgttcaacagcgcatgggatcaatataaagataaagaagatcggcgtgatgacgccagtcgcgaagaaaccgcgcataaagtggcctgggctgctgtgaagcatgaatatgccaaaggggatgatgataaatggcataaaaaaagctaaaaccggtcgcttagttaaagctattcgtgcggtgttgccttgcaagtggtccgtggattgcatattgtcccgttagtggtttcaaaatgagcagtaaaaatgtccggaagacaccaaaaagttgtcgcagggaagtatgcagtggcggaagtgtaaggtgataacgcgtgatttcttgatgaatgccgattgtaaaacggcatttggtgccattgaagaaagtctcttatggagtgcagaacaacgggcggctagcctggcggcgacgctggcttgtcgacctgatgagggaccggtgtggatcttcggctatggaagcttgatgtggaatccggcactggagtttaccgaaagctgcaccggtacactggttggatggcatcgcgcattttgcctgcgcctgaccgccgggcgcgggactgcgcaccagccgggacggatgcttgcactgaaagagggcggacgcaccacaggcgtcgcctatcgactgccagaagagacgctggagcaggaactaaccctgttgtggaagcgagagatgattaccggctgttatctgccaacctggtgtcagcttgatcttgatgatggacgcacagtaaacgccattgtgtttattatggacccgcgacatccagaatatgaatctgatactcgcgctcaggtcatcgcgccgttgattgcggcggcgagcggtccgctgggaaccaacgcacaatacctgtttagtctggaacaggagcttatcaaactgggaatgcaggacgatgggctgaatgatttgctggtaagcgtaaaaaaactgctggcggagaattttccggatggtgtgttacgtccgggattcgcctgagtaaacttcccgcatagtggggcgtcagacgccccctcaaacattaaaatgtgagcactttatcggcactcagcgtccattgcgccagttccacaagagtaccgatttccaccccatcaatcagaggaagtgtactaatcccgcgcccgtcggtacaggttttgcacaatttcaccggtacattctgagcggtaaggatctccagcatttgctgaatgttgtagccttcccctggtttttgcccgcgcaacccggctgtgaccgcatcagacatgaggaacagacgcagatccagattgctctcctgctctcgtaacgcaatggccagccgcaagctgttaaacaaggattcgctcccgtaaggtgcgccattggcaacgatcacgattttttgcattatttactcctgtattcagggaattagacactcatcttctatcttactgcttctgcagcgtctgaccaatcggtcacatttttaaggattttcctgaaagcgcgagaaaatacgacaaaagttgccagtaatcgttattctttaaggctatggtttttcattattaccggaagttaccgacgttttgagccgtttcgttcctcgcattatcccgttttatttactcttgcttgtagcaggcggtacagctaacgcacaatctaccttcgagcaaaaagcggcaaatccctttgataataacaatgatggtctgccggatttaggcatggctcccgaaaatcatgatggggaaaaacactttgctgaaattgtgaaagatttcggcgaaaccagtatgaatgataacgggctggatactggcgagcaggcaaaagctttcgcattgggaaaagtccgcgacgcgcttagtcaacaggttaatcagcacgtagagtcctggctaagtccgtggggaaatgccagtgttgacgtcaaagtggataacgaaggacatttcaccggcagtcgtggaagctggtttgtgccgttacaagataatgatcgttatctcacctggagccagcttggtcttactcagcaggataatgggttggtgagcaatgtgggcgttgggcaacgctgggcgcgcggcaactggctggtgggttataacactttttatgacaacttgctggacgaaaatcttcagcgagcgggctttggtgccgaagcgtggggcgaatatttgcgattaagcacaaacttttatcagccgtttgctgcatggcatgaacagacagccacgcaggaacaacggatggcgcgcgggtacgacctgacagctcggatgcgcatgccgttctatcaacacctcaataccagtgtcagcctagaacagtattttggtgatcgtgttgatttgtttaactctggtacgggttatcacaatcccgtcgcgttgagtctgggattaaattacacccctgtgccattagtcactgtgacggcccagcataaacagggtgaaagtggcgaaaatcaaaataacctcgggctgaatcttaattaccgctttggtgtaccgctcaaaaaacaactttctgcgggcgaggttgccgaaagtcagagcttacgtggtagtcgctatgacaatccgcagcgaaataatctaccgactcttgagtaccgacagcgaaaaacgttaacggtgtttctggcgacaccgccgtgggatctaaaacctggcgaaacagtgccgctgaaattacaaatccgcagtcgttacggtattcggcaactgatttggcagggcgatacgcagatattaagtttgacgccgggcgcacaagccaacagcgcggagggctggacgctgatcatgcctgactggcagaacggggaaggggcaagcaatcactggcgattgtctgtggtggtggaagataaccaggggcagcgtgtctcctccaatgagatcacgctaacgcttgtcgaaccgttcgatgcattgagtaacgacgaactgcgctgggaaccgtaatcagaaaatgcgctcctgatgcacccataccgctgcttccacgcgagacttgagcttcattttcttcagcatgtgcttgacgtgcacttttactgtgctttcggtgatatccaggcggcgggcaatcatcttgttcggcaaaccctgggcaatcagcttgagaatatcgcgctcgcgtggggttaactggttaacatcgcgctcagtagtggcacggttagcgcgcaagctggcggccagaacaggcgttaatgcttcgcttaataccatttcgccagcagctgcctgatgcaatgctttcagcagatcttccggttccatatcttttaacagatagccatccgcgccgcgtttcagtgcggtgaccacatcttcttcatggttagagacgctgaataccacaatgcgcccactgagggacttttcgcgcagtttatccagcgtttccagaccgttcatgccgggcatattgagatctaacaggatcagatcgggatcaagagactccgccagttcaataccctgttcgccattactcgcttcgccaaccacggtgatatctggtgccatactgataagctgttttacgccagttcgcagcatcgggtgatcgtcaatcagcaggatagtagccggttcctgattactcatgggtatctccttggacgtctgtgaaagttttttcgggaataaaggtgaccaccacttcggtgccaccactttcacgacggcggacgcggcaatcgcctcgtaaactttgcgcacgatcgcgcattattatcatgccgtagtgattgctgcggatggcattttcaggcacgccgcagccgttatcctggacggtcagtttgacctgattatcgttttgcgccaccgtcaccacgacttcactcgcttggctatgtttgagggcgttacttaatgcctcacgggcaatttgcaacaagtggattgcctgatggctaggcaccaggcgaggcggcaattgataatccagcttcaccgggaagccaaatttggcgctgtactcttcgcaactcgcctccagcgccggacgtaatccaggctcggtgagctgcaagcggaatgtggtgagcaattcacgcaactgcgcccaggatgcattcagttcgttacggatctgacttaacagttcgcggctgctttctggcagcgcatcgccctgcatctgtaaacaactcacctgcatcttcatgcaagagagagattgggcaatagaatcatgcagttcgcgcgcaatggtggcacgctcttccatcacgatcaactgttgctgacgttcctgatggcgatccagcgccagcgtggcggtgagttgttcaaccagggtatccaccagttgttgttgatcatggctaagatgacgcccctgcggcagggtcgccagcaaaataccgtactgcgtatgagagtcagccagccgccacttcagggtcgtgccgcgatcaccaacgggtaatacgccgcgcgggcagagctggcagcctttatcatcacaagtcatatctggctggcaggtaaactcctgatgattctcttcatcatcagtgtcatacacccgcaattcgatatcacgtagcagggttaaattctgtaagccgttgagtacaggactcaggcgttcacacagcggggcgcgggaatgcaaacggcggttagcctgccataaaaaagagaggatctgatttttatgctccagcccggcggttttctcctgaacccgctgctcaagtacggcataactttcggccagttctgcagacatattgttcaacgcagttccaagcatcgccatttcgttgcgcccgctgatgtttgcgcgttgggtaaaatcgcgatgactgacggcactcgccattgccagcagttgccgccacggttgtagcagtcgcgcccgcaaccagataatagtgaacaccagtaaaagtgccataaataccgccattacccgatggaccagtaccactgtctcgatgcgcatttccgtggtgcggtcaaaaccagataccagttgatcaagcccggcaacaaactggctgacatccgcactcaccgtttctcggttttgtgcacgcatcagcgcagggatcagttcattacgccagtaatcttgtaaaccctgtaattgcgccagttgtccgtctcgttctgctgctcgagtcaactcggcgctaaatgccgtttgttccatctctttaattaagggcttgtctttctcgcttaatggcactgccgccaacagacggtaactttgcatgcgcaggcttcccgctttgttgatcgcatgggcgctgccctgaacgccttgcaccagccagccagaaaccgccatccctgccagtccaatagcagtagaaagcaacacaataagcgcaacctgattaaccagggtgagcggagagagacaacgtttaagcatgtaaacctcttccttcaggctttaaatgagcaataaccttaatgaatgtgacgatacattctggaatggcagtattctcggctattggctgaagtatacccatacccggaaagagttactccttatttgccgtgtggttagtcgctttacatcggtaagggtagggattttacagcaccgtgaaaaatctcataatttttatgaagtcactgtactcactatgggtaatgataaatatcaatgatagataaagttatcttatcgtttgatttacatcaaattgcctttagctacagacactaaggtggcagacatcgaaacgagtatcagaggtgtctatgagtcacagttccgcccccgaaagggctactggagctgtcattacagattggcgaccggaagatcctgcgttctggcaacaacgcggtcaacgtattgccagccgcaacctgtggatttccgttccctgtctgctgctggcgttttgcgtatggatgttgttcagcgctgttgcggtgaacctaccgaaagtcggctttaattttacgaccgatcagctatttatgttgactgcgctgcctagcgtttctggcgcgttattacgtgttccatactcctttatggttcctatcttcggtggtcgtcgctggacggcgttcagcaccggtattctgattattccttgcgtctggctgggttttgccgtgcaggatacctccacgccttatagcgtcttcatcatcatctctctgctatgcggctttgctggcgcgaacttcgcatccagtatggcaaacatcagcttcttctttccgaaacagaagcagggtggcgcgctgggtctgaatggtggtctgggaaacatgggcgtcagcgtcatgcagttggttgctccgctggtggtaagtctgagcattttcgcagtatttggtagccagggcgtcaaacagccggatgggactgagctgtatctggcgaatgcgtcctggatatgggtgccgttccttgccatcttcaccattgcggcgtggtttggcatgaacgatcttgctaccagcaaagcctccatcaaggagcagttgccggtactcaaacggggtcatctgtggattatgagcctgctgtatctggcaaccttcggctccttcatcggcttctccgcgggctttgcaatgctgagtaaaacgcagttcccggatgttcagattctgcaatacgctttcttcgggccgtttattggtgcgctggcgcgttctgcaggtggtgcattatctgaccgtctgggcggaactcgtgtcacgctggtgaactttattctgatggcgattttcagcggcctgctgttcctgaccttaccgactgacgggcagggcggaagcttcatggcgttcttcgcggtcttcctggcgctgttcctgacagctgggctgggtagtggttccactttccagatgattagtgtgatcttccgtaaactgacaatggatcgcgtgaaagcagaagggggttctgacgaacgtgcgatgcgtgaagcggcaaccgacacggcggcggcgctgggtttcatctctgcgattggcgcgattggtggcttctttatcccgaaagcgtttggtagcagcctggcattaacgggtagcccagtcggcgcaatgaaggtatttttgattttctatatcgcctgcgtagtgattacctgggcggtatatggtcggcattctaaaaaataaaccgttactcgtcatacttcgggttacatgtgctgcggctgcgttcattcaccccagtcacttactttagtaagctcctgggattcattcacttgccgccttcctgtaaaccgaattatatagagtaaaatatttgattatcctttgcgcggcatgatgtcgcgctttttttatgcgtcatttagttacaacatactaatgttatatggtttatttcgccggatttcattaagagccattaatatgttacccatggggaatactccttaatacccatctgcataaaaatcttaatagtttaaataactacaggtataaaacgtcttaatttacagtctgttatgtggtggctgttaattatcctaaaggggtatcttaggaatttactttatttttcatccccatcactcttgatcgttatcaattcccacgctgtttcagagcgttaccttgcccttaaacattagcaatgtcgatttatcagagggccgacaggctcccacaggagaaaaccgatgagtaaattcctggaccggtttcgctacttcaaacagaagggtgaaacctttgccgatgggcatggccagcttctcaataccaaccgtgactgggaggatggatatcgccagcgttggcagcatgacaaaatcgtccgctctacccacggggtaaactgcaccggctcctgcagctggaaaatctacgtcaaaaacggtctggtcacctgggaaacccagcagactgactatccgcgtacccgtccggatctgccaaaccatgaacctcgcggctgcccgcgcggtgccagctactcctggtatctttacagtgccaaccgcctgaaatacccgatgatgcgcaaacgcctgatgaaaatgtggcgtgaagcgaaggcgctgcatagcgatccggttgaggcatgggcttctatcattgaagacgccgataaagcgaaaagctttaagcaggcgcgtggacgcggtggatttgttcgttcttcctggcaggaggtgaacgaactgatcgccgcatctaacgtttacaccatcaaaaactacggcccggaccgtgttgctggtttcagcccaattccggcaatgagcatggtttcttacgcaagcggtgcacgctatctcagcctgattggcggtacttgcttaagcttctacgactggtactgcgacttgcctcctgcgtctccgcaaacctggggcgagcaaactgacgtaccggaatctgctgactggtacaactccagctacatcatcgcctgggggagtaacgtgccgcagacgcgtaccccggatgctcacttctttactgaagtgcgttacaaagggaccaaaactgttgccgtcacaccagactacgctgaaatcgccaaactgtgcgatctgtggctggcaccgaaacagggcaccgatgcggcaatggcgctggcgatgggccacgtaatgctgcgtgaattccacctcgacaacccaagccagtatttcaccgactatgtgcgtcgctacaccgacatgccgatgctggtgatgctggaagaacgcgacggttactacgctgcaggtcgtatgctgcgcgctgctgatctggttgatgcgctgggccaggaaaacaatccggaatggaaaactgtcgcctttaataccaatggcgaaatggttgcgccgaacggttctattggcttccgctggggcgagaagggcaaatggaatcttgagcagcgcgacggcaaaactggcgaagaaaccgagctgcaactgagcctgctgggtagccaggatgagatcgctgaggtaggcttcccgtactttggtggcgacggcacggaacacttcaacaaagtggaactggaaaacgtgctgctgcacaaactgccggtgaaacgcctgcaactggctgatggcagcaccgccctggtgaccaccgtttatgatctgacgctggcaaactacggtctggaacgtggcctgaacgacgttaactgtgcaaccagctatgacgatgtgaaagcttataccccggcctgggccgagcagattaccggcgtttctcgcagccagattattcgcatcgcccgtgaatttgccgataacgctgataaaacgcacggtcgtagcatgattatcgtcggtgcggggctgaaccactggtatcacctcgatatgaactatcgtggtctgatcaacatgctgattttctgcggctgtgtcggtcagagcgggggcggctgggcgcactatgtaggtcaggaaaaactgcgtccgcaaaccggctggcagccgctggcgtttgcccttgactggcagcgtccggcgcgtcacatgaacagcacttcttatttctataaccactccagccagtggcgttatgaaaccgtcacggcggaagagttgctgagtccgatggcggacaaatcccgctataccggacacttgatcgactttaacgtccgtgcggaacgcatgggctggctgccgtctgcaccgcagttaggcactaacccgctgactatcgctggcgaagcggaaaaagccgggatgaatccggtggactatacggtgaaatccctgaaagagggttccatccgttttgcggcagaacaaccagaaaacggtaaaaaccacccgcgcaacctgttcatctggcgttctaacctgctcggttcttccggtaaaggtcatgagtttatgctcaagtacctgctggggacggagcacggtatccagggtaaagatctggggcaacagggcggcgtgaagccggaagaagtggactggcaggacaatggtctggaaggcaagctggatctggtggttacgctggacttccgtctgagcagcacctgtctctattccgacatcattttgccgacggcgacctggtacgaaaaagacgacatgaatactagcgatatgcatccgtttattcacccgctgtctgcggcggtcgatccggcctgggaagcgaaaagcgactgggaaatctacaaagccatcgcgaagaaattctccgaagtgtgcgtcggccatctgggtaaagaaaccgacatcgtcacgctgcctatccagcatgactctgccgctgaactggcgcagccgctggatgtgaaagactggaaaaaaggcgagtgcgacctgatcccaggtaaaaccgcgccacacattatggtcgtagagcgcgattatccggcgacttacgaacgctttacctctatcggcccgctgatggagaaaatcggtaatggcggtaaagggattgcctggaacacccagagcgagatggatctgctgcgtaagctcaactacaccaaagcggaaggtccggcgaaaggccagccgatgctgaacaccgcaattgatgcggcagagatgatcctgacactggcaccggaaaccaacggtcaggtagccgtgaaagcctgggctgccctgagcgaatttaccggtcgtgaccatacgcatctggcgctgaataaagaagacgagaagatccgcttccgcgatattcaggcacagccgcgcaaaattatctccagcccgacctggtctggtctggaagatgaacacgtttcttacaacgccggttacaccaacgttcacgagctgatcccatggcgtacgctctctggtcgtcagcaactgtatcaggatcaccagtggatgcgtgatttcggtgaaagcctgctggtttatcgtccgccgatcgacacccgtagcgtgaaagaagtgataggccagaaatccaacggcaaccaggaaaaagcgctcaacttcctgacgccgcaccagaagtggggtatccactccacctacagcgacaacctgctgatgctgactttaggtcgcggtggtccggtggtctggttgagtgaagccgatgccaaagatctgggtatcgccgataacgactggattgaagtcttcaacagcaacggtgctctgactgcccgtgcggttgtcagccagcgtgttccggcagggatgaccatgatgtaccacgcgcaggaacgtatcgttaacctgcctggtagcgaaattacccaacagcgtggtggtatccataacagcgtcacccgtatcacgccgaaaccgacgcatatgatcggcggctatgcccatctggcatacggctttaactactatggcaccgtaggttctaaccgcgatgagtttgttgtagtgcgtaagatgaagaacattgactggttagatggcgaaggcaatgaccaggtacaggagagcgtaaaatgaaaattcgtagtcaagtcggcatggtgctgaatctcgataagtgcatcggctgccacacctgtagtgttacctgtaaaaacgtctggaccagccgtgaaggcgtggaatatgcgtggttcaacaacgtggaaaccaagccgggccagggcttcccgactgactgggaaaaccaggaaaaatacaaaggcggctggatccgtaaaatcaacggcaaactgcagccgcgcatgggtaaccgtgccatgctgctgggtaaaatcttcgctaacccgcatctgccggggatcgacgattattacgagccgttcgattttgactatcagaacctgcataccgcgccggaaggcagcaaaagccagccgattgcccgtccgcgtagcctgattaccggggaacggatggcgaaaatcgaaaaagggccgaactgggaagatgacctgggcggtgagtttgacaaactggcgaaagacaagaacttcgacaacatccagaaggcgatgtatagccagttcgaaaacaccttcatgatgtatttgccgcgcctgtgcgaacactgcctgaacccggcatgtgtggcgacctgcccgagcggtgcgatttacaagcgtgaagaagatggcatcgtcctgatcgaccaggataaatgccgtggctggcgtatgtgcatcactggatgcccgtacaaaaaaatctacttcaactggaagagcggtaagtctgagaagtgcatcttctgctatccgcgtattgaagcgggtcagccgaccgtgtgcagtgaaacctgtgtcggtcgtatccgttatcttggcgtgctgttgtacgatgccgacgctattgaacgtgcagccagcaccgagaacgagaaagatctttaccagcgtcagctggacgtgttcctcgatccgaacgatccgaaagtcatcgagcaggcgattaaagacggtattccgctgagcgttattgaagccgcacagcagagcccggtttataaaatggcaatggaatggaaactggcgctgccgctgcatccggaatatcgcacactgccgatggtctggtacgtgccgcctctgtctccgattcagtctgcagcagacgcgggtgagctgggtagcaacggcattctgccagacgtcgaaagcctgcgtattccggtacagtatctggcgaatctgctgaccgccggtgataccaaaccggtactgcgcgcactgaaacgtatgctggcgatgcgtcattacaaacgtgctgaaaccgttgacggtaaagttgatacccgtgcgctggaagaggtcggtctgaccgaagcccaggcacaggagatgtaccgttatctggcgattgctaactacgaagatcgctttgtggtgccgagtagtcatcgtgaactggcacgggaagccttcccggagaaaaatggctgcggctttacctttggtgatggctgccacggtagtgataccaaattcaatctgttcaacagccgtcgtatcgatgccatcgatgtgaccagcaaaacggagccgcatccatgatcgaactcgtgattgtaagccgtctccttgaatatccggatgctgccttatggcagcatcaacaagagatgtttgaggcgattgccgcgagcaaaaatctgccaaaagaggatgcccatgcgctgggcattttcctgcgcgatttaacgacgatggatccgctcgatgcccaggcgcagtacagcgaactgttcgaccgtggccgcgccacgagtctgttgctgtttgaacatgtgcacggcgaatcccgcgaccgcggccaggcgatggtggacctgctggcgcagtacgagcagcacggcttgcagttaaacagccgcgaattgccggaccatctgccgctgtatctggagtacctggcgcagctgccgcaaagcgaagccgtggaaggtttgaaagatatcgcgccgattctggcattgctgagcgcgcgtctgcaacagcgtgaaagccgttatgccgtgctgtttgatctgctgctgaaactggcgaataccgctatcgacagcgacaaagtggcggaaaaaattgccgacgaagcgcgcgatgatacgccgcaggcgctggatgctgtctgggaagaagagcaggttaaattctttgctgacaaaggctgcggtgatagtgcaatcactgcgcatcagcgtcgctttgccggtgccgtcgcgccgcaatatctgaatatcaccaccggaggacagcactaatgcaattcctgaatatgttcttctttgatatctacccgtacatagccggggcggtcttcctgattggtagctggctgcgttatgactacgggcagtacacctggcgcgcggcgtccagccagatgctggatcgcaaagggatgaacctggcgagcaacctgttccatatcgggattctggggatttttgtcggtcacttcttcggtatgctgacgccgcactggatgtatgaagcctggctgccgattgaagtgaaacagaaaatggcaatgtttgctggtggtgccagcggcgtgctgtgtctgattggcggcgtgctgttgctgaaacgtcgtctgttcagcccacgcgtgcgtgcaaccactaccggagcggatatcctgatcctgagcctgctcgttatccagtgcgcgctgggcctgttgaccattccgttctccgctcagcatatggacggtagcgagatgatgaaactggttggctgggcgcagagcgtggtgaccttccacggtggcgcttctcaacacctcgatggtgtggcgtttatcttccgtctgcacctggtgctggggatgacgttattcctgctgttcccgttcagccgtctgatacacatctggagcgtaccggtggagtatctgacacgtaagtaccagctggtgcgcgctcgtcactaagcgaattttagttcacatagaccctgcttcggcggggtttttttatgggcacggtgcggggtgagttgtcggatgcgcttcgcttatccgacctacaggggaggatattgtaggcccggtaaacgtggtgccatcgggcaaaattagctcggagtaacaggttttgattatttaaggaagcgatggtggtgggggaaggattactcagcgctgcgcgcttcgcccttcgggtcgttgcctgcggcaacgctctcagcctggcgctcaagagcaaccttggtcgaagcttcagttccttccccgcttgggcagaatatttgattgcggatagctttgagaattccggggcttttgaaagtgatggtggtgggggaaggattactcagcgctgcgcgcttcgccctagcggtcgttgcctgcggcaacgctctctcgctgacgctcgagccgaaccttaatcgaagcttctcatccttccccgcatgggcagaatatttgattgcggattcgcttgagagttcagggacttttgaaagtgatggtggtgggggaaggattactcagcgctgcgcgcttcgcccttcgggtcgttgcctgcggcaacgctctctcgctggcgctcgagtgctaccttggtcgaagcttctcatccttccccgcatgggcagaatatttaattgcggattcgttgggaagttcagggacttttgaaagtgatggtggtgggggaaggattcgaaccttcgaagtcgatgacggcagatttacagtctgctccctttggccgctcgggaaccccaccaggggtaattcaaattttgaggtaatgcttgagatggtggtgggggaaggattattcgtcgcttcgctcctcacccttcgggccgttgcctgtggcaacgttctctcgctttcgctcgaatcgaaccttagtcgaaggttctcacccttccccgatgagtgcaaactttcacaatctcaccgaagttaccacatcgctgtggtgaattatggtggtgggggaaggattcgaaccttcgaagtcgatgacggcagatttacagtctgctccctttggccgctcgggaaccccaccacggggtaatgctttttactggcctgctcccttatcgggaagcggggcgcatcatatcaaatgacgcgccgctgtaaagtgttacgttgagaaaaatgaactggttgcgtaattttcatccgtaacggattaaaggtaaccagttatttttgctggcgattaaagaataatcgttcgattaccgtaaacaaagacgcgctgtgccagtactttgtatagtgcacgacttaagacgtttttctcgacgtcacgacctgcgcgcatcatatcttcagctgtgtaggtatgatcgacatgaataacgtcctgcatgatgattgggccttcgtccagattgtcattcacatagtgagcggttgcgccaataatcttcacaccacgttcataggcctggtgataaggacgtgcgccaataaacgctggcaggaaactatggtgaatattgatgatcttattcgggaagcgtgccacaaattccggcgttaatacccgcatatacttcgccagcaccacgtagtcaggttgataagcatcaatggcatccgccatcttttgatcgtgctcgttgcgggttaacccttcatggcttaccagctcaaacggaatatcaaaacgctcaaccagagaacgtaaagtatcgtggttaccaataactgccgcgatttcgacatccaggccgccgtaattggctttcatcaacaaatcgccaaggcaatgcgcttctttagtgaccagaatcactatccggcgacgaccggcaggattcagctcacgcacggagccttctggcaatgcgctatcgagatccgccagcagggtggaatcattaaaaatcccttccagttccgtgcgcataaaaaagcgcccggtacggtgatcaacaaattcattgttctgtacgatatttaactcgtgcttgtagcaaatattggtaatacgtgcgatcagacctttttggtccggacaaatagtacgcagaactttacgttggagactatgcattgctggaaaaaccttgttgagagtgtttgctaaaccgtaccgtcaaccattattggccgcagcactttttaaattttttaccactaccacaagggcagggatcgttgcgaccaaactgcggacgtgtaccgtcaatatagtaccattgaccgttttctttcaaaaatcggctacgttcaattattgcacctgttttaccaccttcggtaaatcgagcaacaaaactgacaaatccgatattgtcggcgtcctgccaacaatgttcaaatacggtcaatcccaaccattcagtatgcgcaaatccggccatcaattcggcacgtaacgccgctgctccacaagagggatgccaggtctttattaaataatctgcgtcttgcatcacaaaagcgcagtaacggctacgcatgagatgttctggatcaggtgcaaccttttcaccagacacataagggtggcaacataggctatactcgacagcactaccacagggacaaagctgagacacaaataatctccctggaaacaataacggcgtattaaccgcctgagtagcactatgttaaccgagcagtagcgatgtggctacgattgcattccaggggaatcttgcgggaataatgagaaagataaaaatagggctggcgctgggatctggcgcggcgagaggttggagccatattggcgttattaatgcgctaaaaaaagtgggtattgaaattgatatcgttgcaggatgtagtattggtagcctggtgggcgctgcctatgcatgcgatcgattatctgcgctggaagattgggtgacctctttcagttattgggatgttttacgcctgatggatctctcctggcagcgcggtgggttactgcgcggcgagcgtgtcttcaatcaataccgcgaaataatgccggaaacagagatcgaaaattgttcccgtcgctttgcggctgttgccaccaatttaagtacgggacgtgaattatggtttactgaaggcgatctccatcttgctattcgcgcaagttgcagtattccaggactcatggcacctgttgcacataacggctactggctggttgatggagcagtcgttaacccaattcctatttccctcacgcgtgcattgggggctgatattgtgatagcggttgacctgcagcacgatgctcatttgatgcaacaagatttgctctcctttaatgtcagtgaagaaaatagcgagaatggtgattctctgccgtggcatgcgcgtctgaaagaaaggttaggcagcataacgacacgtcgggcggtgacagcgccaacggcaacagagattatgaccacttctatccaggtgctggagaaccgccttaaaaggaaccgcatggcaggtgatccgcccgatattctgattcaacctgtttgcccgcaaatatctacgcttgatttccatcgcgcgcacgctgccattgcggccggacagctggcagtggaaaggaaaatggacgaacttttgccgttggtacgcaccaacatttgaccagaatttttatctacacttaagttaattctgacaggcgcaggtggcaatagcatgccactattgagtaaagccagtcaggggagagaacatgacgcagccattggtcggaaaacagattctcattgttgaagatgagcaggtatttcgcagccttctggatagttggttttccagtttgggagcgacaacggtactggcggctgatggggtggatgcccttgagttgctgggaggtttcactccagacctgatgatatgtgatatcgcgatgccacgaatgaacgggcttaaactgctggagcatatacgtaacagaggcgaccagaccccagttctggtgatatctgccactgaaaatatggcagatattgccaaagcgttacgtctgggcgttgaagatgttttgctgaaaccagttaaagatctgaatcgcttgcgcgagatggtttttgcctgtctctatcccagcatgtttaatagccgcgttgaggaagaggaaaggctttttcgcgactgggatgcaatggttgataaccctgccgcagcggcgaaattattacaggaactacaaccgccggttcagcaggtgatttcccattgccgggttaattatcgtcaattggttgccgcggacaaacccggcctggtgcttgatattgccgcacttagcgaaaacgatctggcattttattgccttgatgtcacccgagctggacataatggcgtacttgctgccttgttattacgcgcattgtttaacggattattacaggaacagcttgcacaccaaaatcaacggttgccagagttgggcgcgttattgaagcaggtaaaccatttacttcgtcaggccaatctgccggggcagtttccgctattagttggctattatcatcgcgaactgaaaaatctcattctggtttctgcgggtctgaatgcgacgttaaataccggcgaacaccaggtgcaaatcagtaatggtgttccgttaggcactttaggtaacgcttatttgaatcaattgagccagcgatgcgatgcctggcaatgccaaatatggggaaccggtggtcgactgcgcttgatgttgtctgcagaatgagcaaacgataacgcgggctaaatttgcattacctgctaatgtcggctggtggtactatcgtcgccattcgtataagtaattgtcttaattatgctaactcgcctccttttcagaacttagccccttcggggtgctgatatactgggatgcgatacagaaatatgaacacgttcaaaacacgaacagtccaggagaatttaaatggctgccattaatacgaaagtcaaaaaagccgttatccccgttgcgggattaggaaccaggatgttgccggcgacgaaagccatcccgaaagagatgctgccacttgtcgataagccattaattcaatacgtcgtgaatgaatgtattgcggctggcattactgaaattgtgctggttacacacagttctaaaaactctattgaaaaccactttgataccagttttgaactggaagcaatgctggaaaaacgtgtaaaacgtcaactgcttgatgaagtgcagtctatttgtccaccgcacgtgactattatgcaagttcgtcagggtctggcgaaaggcctgggacacgcggtattgtgtgctcacccggtagtgggtgatgaaccggtagctgttattttgcctgatgttattctggatgaatatgaatccgatttgagtcaggataacctggcagagatgatccgccgctttgatgaaacgggtcatagccagatcatggttgaaccggttgctgatgtgaccgcatatggcgttgtggattgcaaaggcgttgaattagcgccgggtgaaagcgtaccgatggttggtgtggtagaaaaaccgaaagcggatgttgcgccgtctaatctcgctattgtgggtcgttacgtacttagcgcggatatttggccgttgctggcaaaaacccctccgggagctggtgatgaaattcagctcaccgacgcaattgatatgctgatcgaaaaagaaacggtggaagcctatcatatgaaagggaagagccatgactgcggtaataaattaggttacatgcaggccttcgttgaatacggtattcgtcataacacccttggcacggaatttaaagcctggcttgaagaagagatgggcattaagaagtaacatccgtatcggtgttatccacgaaacggcgttgagcaatcgacgccgtttttttatagcttattcttattaaattgtcttaaaccggacaataaaaaatcccgccgctggcgggattttaagcaagtgcaatctacaaaagattattgcttgatcaggaaatcgtcgagggatttaccttgctcatccattgcttttttgattacagctggagtacggccttggccagtccaggttttagtttcgccgttttcgtcaacgtagctatattttgccggacgctgagcacgtttagctttggtgccagatttaacggcagcaaggctattcagcagttcgttcgggtcaataccgtcagcgatcagcatttcgcgatattgctgcagtttacgagtgcgctcttcaacttcagcagcagccgcgctttcttcttcgcgacgttcgttaacaacaacttctaatttttccagcatttcttccagcgtttcaagtgtacattctcttgcctgcgcacgaagagtacggatgttgttcagaattttaagtgcttcgctcattgtagtaatctcaaacttatattggggtggtttgttgaggtaataatagagccttaaattcagttgtgcaatagccaggaatgtaaggaattcaaaattgttctttattttgtgccgccaataaatatcttttcataaaattagccagaaaagacgcggcatatagccctatttacaccgatgatttcgcagcacgtgaggttaaaacttcctgattcatgtcacattttatggggagattatcgtaggctgacgacctttcagtcttctgtattagttgtgtttacgagaattccctattaagcgaatgatgaaaagtagaacagtcgcaataagagcatggacttagtattgcactatctcctggaggtcaacagagggctattacttgcgcaacaggttaaagattgtgaatagttaccagcagtcatttacccgcttataacaagcgaggcagttgtaatgatagctcagaaggattatgcaaggcttcgtaagggagaacgcatatacccacttctgtgcatactgttgagctgaaaaactgacgaattatgataaactccagccaactttatttcatatcattgagggcctgtggctgatggcacagctatatttctactattccgcaatgaatgcgggtaagtctacagcattgttgcaatctagttacaattaccaggaacgcggcatgcgcactgtcgtatatacggcagaaattgatgatcgctttggtgccgggaaagtcagtagccgtataggtttgagtagccctgcaaaattatttaaccaaaatagtagtttatttgatgagattcgtgcggaacatgaacagcaggcaattcattgcgtactggttgatgaatgccagtttttaaccagacaacaagtatatgaattaagcgaggttgtcgatcaactcgatatacccgtactttgttatggtttacgtaccgattttcgaggtgaattatttattggcagccaatacttactggcatggtccgacaaactggttgaattaaaaaccatctgtttttgtggccgtaaagcaagcatggtgctgcgtcttgatcaagcaggcagaccttataacgaaggtgagcaggtggtaattggtggtaatgaacgatacgtttctgtatgccgtaaacactataaagaggcgttacaagtcgacagtttaacggctattcaggaaaggcatcgccacgattaataagaatttctttactgacagggtgagcagggcacttttatcctgtcagttcgttttacgcacttcttccgggctatatacccttctcggcagttttttaacgccgctatacgcctcacagggctcttaagcaccgacgttgacttgtgacctgtaaagtacaatatccctgtgtttaggcgttatacatcgtcgcaaatatgatgaaggctaatgctgtcggtttatggaaaagttgctttgggtaaacaaaaaatacggccccagaagggcaatgccgttcacttaagaggagcggcactatgtttcacaggataacgggtttttgatatcttaaccgacctcggccttgatggtcgggggcgttttgttatgaacaccacttccagagcaccccgaagatgctccagtcgtttcgggatggtccctggtgacgccgtgtttcccagctctatcatttctgatgcgatattcttccacgcaggcagtagccagtggcggttacaacccttctggttcagcgtcagcagcaggtcttcgctgtaaaaaagtttatcaaacaacgtaatagagttatccgggatggtggcgagcatggagtgggccagcacagtttcgctctgccggtaaggtgcggtcacggcattcagcagaatgtgacttcccaggttcattaaggccaccagacgcataaccgggtaggcgttctgccgcttagtggatgtgttggcagacccataatattcacgcagctcgggtttatcaggtgtcctgaactgtgcgccatcaatggcaaaaagttgcaggccgtgccagtcatccttcaggtaacgttccgcgcccctgtctgtgcggtctggcggaagagccattccactggggcggcccccacgcgctgacgcgcctgggtgacagcgctgcgggccagcaggttcatccccgcttcgccatccgcgctcaggttcagacggcgaacaacatcggtaattggctcattgcaccaccatccagataaccatgtcccccggtaaacgacggcggcgaacggtcgcatgagcagaaagcgtcaggcagtgttgtatccactcggtgggaaggtgttctgcaaatagttgtgcagagggcggaggcataagcggatggtcactgaaatcgagcagatcattgagaagtggcataagaaaacggctccctgttgtggaagccgttatagtgcctcagtttaaggatcggtcaactaatccttaactgatcggcattgcccagaaggggccgtttatgttgccagacagcgctactgattaagcggattttttcgcttttttctcagctttagccggagcagcttctttcttcgctgcagtttcaccttctacataatcacgaccgtagtaggtatccagcagaatctgtttcagctcggagatcagcgggtaacgcgggttagcgccggtgcactggtcatcgaatgcatcttcagacagtttatccacgttcgccaggaagtctgcttcctgaacgccagcttcacggatagatttcggaatacccagttcagctttcagcgtttccagccatgccagcagtttctcgatcttagcagcagtacggtcgcccggtgcgctcagacccaagtggtcggcaatttcagcataacgacggcgagcctgcggacggtcatactggctgaatgcagtctgcttggtcgggttgtcgttcgcattgtagcgaataacgttacaaatcagcagggcgtttgccagaccgtgcggaatatggaactgggaacccagtttgtgcgccatactgtgacatacacccaggaaggcgttcgcaaacgcgatacccgcgatagtcgctgcactgtgaacacgttcacgcgctaccggatttttagacccttcgtggtaggacgctggcagatattctttcagcagtttcagtgcctgcagagcctgaccatcagagaactcagatgccagtacagaaacataagcttccatggcgtgagttactgcgtccagaccaccgaaagcacacagggacttcggcatgtccataaccaggttggcgtcgacaatcgccatatccggagtcagcgcatagtctgccagcggatatttctgaccagtagcgtcgtcagttacaaccgcaaacggagtgacttcagaacctgtaccagaagtggtggtgacagcgatcattttcgctttcacgcccattttcgggaacttgtagatacgtttacggatatccataaagcgcagcgccagctcttcgaagtgagtttccggatgttcgtacataacccacatgatcttcgcggcgtccatcggggaaccaccacccagcgcgataatcacgtctggtttgaaggagtttgccagttctgcacctttacgaacgatgctcagggtcgggtccgcttctacttcgaagaagacttcagtttcaacgcctgctgctttcagtacggaagtgatctgatcagcataaccattgttgaacaggaagcggtcagtcacgatgagcgcacgtttgtggccatcagtaatcacttcatccagcgcgattggcagggagccacggcggaagtagatagatttcggaagtttgtgccacaacatgttttcagctcgcttagcaacggttttcttgttgatcaggtgtttcggaccaacgttttcagagatggagttaccaccccaagaaccacaacccagagtcagggaaggtgcgagtttgaagttatacaggtcaccgataccaccctgagacgctggggtgttaatcaggatacgcgccgttttcattttctgaccgaagtaagaaacgcgagccggttggttatcctggtcagtgtacaggcaagaggtatgaccgataccgcccatagcaaccagtttctctgctttttctaccgcgtcttcgaaatctttagcgcggtacattgccagagtcggggacagtttttcatgtgcgaacggttcgctttcatcaacaacggtcacttcaccgatcagaatcttggtgttttctggtacagagaagcctgccagttcagcaattttataggctggctgaccaacgatagccgcgttcagcgcaccgtttttcaggataacatcctgaacagctttcagctctttaccctgcaacagatagccgccgtgggttgcaaaacgttcacgtacagcgtcataaacagagtcaacaacaacaacagactgttcagaagcacagattacgccgttgtcgaaggttttggacatcagtacagatgcaactgcacgtttgatatcagcagtttcatcgataacaactggagtgttgcccgcgcctacaccgatagctggtttaccggagctgtatgcggctttaaccatgcccggaccaccagtcgcgaggatcaggttgatgtctgggtggtgcatcagtgcgttagacagttcaacagaaggttgatcgatccagccgatcagatctttcggagcaccggcagcgatagcagcctgcagaacgatatcagccgctttgttggtggcatcttttgcacgcgggtgcggggagaagataatggcgttacgggtcttcagactgatcaggcttttgaagatagcagtactagtcgggttagtggtcggaacgataccgcaaataataccgattggttcagcgatagtgatggtaccaaaagtgtcgtcttcagacagaacaccacaggttttttcatctttataggcgttgtagatatattcagaagcaaagtggtttttgatcactttatcttcgacgatacccatgccggattcggcaacggccattttcgcgagtgggattcgagcatctgcagcagccagagcggcggcgcggaagattttgtctacttgctcttgagtgaaactggcatattcacgctgggctttttttacacgctctacgagtgcgttaagttcagcgacattagtaacagccataatgctctcctgataatgttaaacttttttagtaaatcatctgctcgaatacgagagtatagtcagtgcggtgatgatttgcttaacctatgaaaatcaaaagcttactcgcgctcacactcactgtgatttactaaaagagtttaaacattagagttattatctctaatgcgtcacttccaggtggcgtaagcaagattactcacttctgggtactgattacgtgatccaaatcaaatttttgcaaagctgacacctttcagcatcgcttttcgccattatagctaacagttaataaattgtagtatgatttggtggctacattagcatgttttgcacaactagataacaataacgaatgatagcaattttaagtagttaggaggtgaaaaatgctgtcaaaaggcgtattgtcagcgcgtcttttcaaccttatttatggctaacattatccggcttttgcttcggagctaaccgtgattcagaccttttttgattttcccgtttacttcaaatttttcatcgggttatttgcgctggtcaacccggtagggattattcccgtctttatcagcatgaccagttatcagacagcggcagcgcgaaacaaaactaaccttacagccaacctgtctgtggccattatcttgtggatcagcctttttctcggcgacacgattctacaactttttggtataagtattgatagcttccgtatcgccgggggtatcctggtggtgacaatagcgatgagcatgatcagcggcaagcttggcgaggataaacagaacaagcaagaaaaaagtgaaaccgcggtacgtgaaagcattggtgtggtgccactggcgttgccgttgatggcggggccaggggcgatcagttctaccatcgtctggggtacgcgttatcacagcattagctatctgtttggtttctttgtggctattgcattgttcgctttatgttgttggggattgttccgcatggcaccgtggctggtacgggttttacgccagaccggcatcaacgtgattacgcgtattatggggctattgctgatggcattggggattgaatttatcgttactggtattaaggggattttccccggcctgcttaattaattcctttcaaatgaaacggagctgccatgctccgtttacttcgtcattatttttactttgttcccgcgcagttatcaaaagcaaaaggaataggtaaaaatattcttctcaaattacagttagttataaggatttccttaactgcttctcctcaccatcatgttattttcgccacatcataatcctgggcttgctgaagaataattgaaatgatattattaattccactgcctttggtagaggaaagtgctaaataataatcaattgttaaattattgtgcatttcactactggaactgtaatcagaaaagatagacatgcttagccaatctctatttgattgaattgaaagatgtttgttaaggcatggatgcaagctatagattctgatacggtcaataaaagagaattgcttaacaattttgcaaaatgtattggcgagtaagaaccgcatttggtactttccgggcaaccgccagacgattctttattggtaatgagaataattaacaattaaagagcgtcgcgaaagaataatgtgtctcgacaggggagacacagtacgaatcgacataaggtgatcgtctgaatcaccagaataaataaagtcggtgatagtaatacgtaacgataaagtaacctgacagcagaaagtctccgagcctgtgcagggtcccaatccgggattacacatgctggttaataccagtaattataatgagggagtccaaaaaacaatgaccaacatcaccaagagaagtttagtagcagctggcgttctggctgcgctaatggcagggaatgtcgcgctggcagctgatgtacccgcaggcgtcacactggcggaaaaacaaacactggtacgtaacaatggtagtgaagttcagagtttagatccgcacaaaattgaaggtgttccggagtctaatatcagccgagacctgtttgaaggcttactggtcagcgatcttgacggtcatccagcacctggcgtcgctgaatcctgggataataaagacgcgaaagtctggaccttccatttgcgtaaagatgcgaaatggtctgatggcacgccagtcacagcacaagactttgtgtatagctggcaacgttctgttgatccgaacactgcttctccgtatgccagttatctgcaatatgggcatatcgccggtattgatgaaattcttgaagggaaaaaaccgattaccgatctcggcgtgaaagctattgatgatcacacattagaagtcaccttaagtgaacccgttccgtacttctataaattacttgttcacccaagtactagtccggtgccaaaagccgctatcgagaaattcggcgaaaaatggacccagcctggtaatatcgtcaccaacggtgcctataccttaaaagattgggtcgtaaacgaacgaatcgttcttgaacgcagcccgacctactggaacaacgcgaaaaccgttattaaccaggtaacctatttgcctattgcttctgaagttaccgatgtcaaccgctaccgtagtggtgaaatcgacatgacgaataacagcatgccgatcgaattgttccagaagctgaaaaaagagatcccggacgaagttcacgttgatccatacctgtgcacttactattacgaaattaacaaccagaaaccgccattcaacgatgtgcgtgtgcgtaccgcactgaaactaggtatggaccgcgatatcattgttaataaagtgaaagcgcagggcaacatgcccgcctatggttacactccaccgtatactgatggcgcaaaattgactcagccagaatggtttggctggagccaggaaaaacgtaacgaagaagcgaaaaaactgctggctgaagcgggttataccgcagacaaaccgttgaccatcaacctgttgtataacacctccgatctgcataaaaagctggcgattgctgcctctagtttgtggaagaaaaacattggtgtaaacgtcaaactggttaaccaggagtggaaaacgttcctcgacacccgtcaccagggtacttttgatgtggcccgtgcaggctggtgtgctgactacaacgaaccaacttccttcctgaacaccatgcttagcaacagcagcatgaataccgcgcattataagagcccggcctttgacagcattatggcggaaacgctgaaagtgactgacgaggcgcagcgcacagctctgtacactaaagcagaacaacagctggataaggatagcgccattgttcctgtttattactacgtgaatgcgcgtctggtgaaaccgtgggttggtggctataccggcaaagatccgctggataatacctatacccggaatatgtacattgtgaagcactaatggcaatacgtggggcaggagtgtcctgctccacggtgtctgatttttatcgcattacagaaggcacaggccagaaggtagggcaatgttaaaatttattctacgtcgctgtctggaagcgattccgatgctatttattcttattactattagcttctttatgatgcgcctcgcgccgggaagcccttttaccggcgaacgtactttaccgccagaagtgatggccaatatcgaagcgaaatatcatcttaatgatccgatcatgacacagtatttcagctacctgaaacaactggcgcacggtgatttcggtccaagctttaaatataaagattatagcgtcaatgacttggttgcatccagttttcccgtttctgccaaactgggagccgcagcatttttccttgcggtaatactgggtgttagtgctggcgttattgccgcattaaaacaaaacaccaaatgggactataccgtgatggggctggcaatgaccggggttgttatccccagttttgtggttgcaccattattagtcatgatatttgcgatcattttgcattggctgccgggcggtggctggaatggtggggcgcttaaattcatgatattgccgatggtggcgttgagtctcgcttatatcgccagtattgcgcgtattacccgtggctctatgattgaagtattacactccaattttattcgtactgcccgggcgaaagggttacctatgcggcggatcattttacgtcacgcattaaaacctgctctgttacccgtgctctcttatatgggccccgcatttgtcggcattattaccggttctatggttatcgaaaccatttatggtttgccggggattggacaactgttcgttaatggcgcattgaaccgtgactattccttagtgttaagcctgaccatcctggttggtgctttaaccattttgtttaatgccattgtcgatgtgctatatgcggttatcgacccgaaaatccgttactgatactggagctcgcgatgatgttaagtaagaaaaacagcgagacgctggaaaatttcagtgaaaagctggaggtcgaagggcgcagcttgtggcaggacgcacgtcgacgttttatgcataaccgtgcggcggttgccagtctgatagtgctggtgctgatcgcgttatttgtaatcctggcaccgatgctttcccagtttgcctatgacgatactgactgggcgatgatgtccagcgccccggatatggagtccggtcactactttggtactgacagttccggtcgcgacctgcttgtgcgcgttgcgattggcgggcgtatcagtctcatggtcggtgttgctgcggcactggtggctgtggtcgtcgggacactttatggtagcctttccggttatctgggcggtaaagtggatagcgtaatgatgcgtctgctggaaatcctcaactccttcccattcatgttcttcgtcattttgctggtgacctttttcggtcaaaacatcctgctgattttcgtggcgataggcatggtttcctggctggatatggctcgtattgtgcgtgggcaaaccctgagtctgaagcgcaaagagtttattgaggcggcacaagttggcggtgtaagcacaagcggcattgttattcgccacattgtgccgaatgtactcggtgtggtggtggtctacgcaagtcttctggtgcccagcatgatcctctttgaatctttccttagcttcctggggttgggtacgcaagagccgttaagcagctggggtgcattgctgagtgatggcgcgaacagcatggaagtctctccatggttattgttgttcccagcgggattcctcgtggtgacgctgttttgtttcaactttatcggcgatggcttgcgtgatgccctcgacccgaaagatcgttaaggagtgcagccatgagcgtaattgaaactgcaactgtgccgctcgcacaacaacaggctgacgcactgctgaacgtgaaagatttgcgtgtcacctttagtaccccggacggcgacgtcacggcggtcaatgatttgaatttttccctacgtgccggagaaacgctgggtattgtaggtgagtctggtagcggtaaaagccaaactgcatttgcgttgatgggcctgttggctgccaacggacgtattggcggaagcgcaaccttcaatgggcgtgaaatcctcaatttgccagagcatgaactcaataaactgcgcgctgaacaaatcagtatgatttttcaggacccaatgactagcttgaatccctatatgcgcgtcggtgagcagttgatggaagtgctgatgctgcataagaacatgagcaaagctgaggcgtttgaagagagcgtgcggatgctcgatgcggtaaaaatgccggaagcgcgtaaacgcatgaaaatgtacccgcacgaattttctggcggcatgcgtcagcgagtcatgattgcgatggccttgttatgtcgacctaagctgctgattgcggatgaaccaacaactgcgctggacgtcaccgtacaggcgcagatcatgacgctattaaatgaactgaagcgggaatttaataccgccatcattatgatcacccacgatcttgtcgtggtggcggggatctgcgacaaagtgctggtaatgtacgccgggcgcacgatggaatatggcaacgcgcgcgatgtcttttatcaacccgttcatccttattctatcggtttgctcaacgcggtgccgcgtctcgatgcggaaggtgaaacaatgttgaccatcccgggtaatccgccaaacctgctgcgattaccgaaaggttgcccgttccagccacgttgtccgcatgcgatggaaatttgtagtagcgcaccgccgctggaagagtttacgcctggccgtctgcgtgcttgctttaaaccggtggaggaactgttatgaatgctgtaactgaaggaagaaaagtcctccttgaaatcgccgatcttaaagtgcactttgaaatcaaagatggcaaacagtggttctggcaaccgccgaaaacgctcaaagccgtcgatggtgtcactcttcgcctgtatgaaggggaaacattaggtgtggtaggggaaagcggatgcggtaagtccacctttgctcgcgccatcatcggtttggtcaaggcgaccgacggtcatgttgcctggttaggtaaagagttgctgggcatgaaacccgatgaatggcgtgccgttcgcagtgatattcagatgattttccaggatccgttggcaagcctaaacccgcgtatgaccatcggcgagatcatcgctgaaccactgcgtacttatcatccgaaaatgagtcgccaggaagttcgcgagcgcgtgaaggcgatgatgctgaaagtcgggttattgcctaacctgattaaccgctatccgcatgagttctctggtgggcagtgccagcgtatcgggattgcgcgtgctcttattcttgaaccgaagctgattatctgtgatgagccggtgagcgcgctggacgtgagtattcaggcacaggtggtcaacctgctccagcaattgcaacgtgagatgggattgagtttaatttttatcgctcatgacctggccgtggtaaaacacatttccgatcgtgtgttggtgatgtatctcggccatgcggtagaactggggacctatgatgaggtctaccacaatccactacatccttacaccagggcattgatgagcgcagtccccatacctgatccggatctggagaagaacaaaaccatccagttactggaaggggaattaccgagcccgatcaacccgccttccggttgtgttttccgtacccgttgcccgattgccggtccagagtgcgccaaaacacgtcctgttctggaggggagtttcagacactccgtttcttgcctgaaagtcgatccgctttaaaaacaataagggctgacagttgtcagccctttttcacgctaaaagcgattatttattcccgccagatgatatggcaaagtttgtgatctttttcgcggcataacagaatgcgggcaaaaacatcgttgatttcaccatcttcactgtccgccagaccaatcaccacttcggcaaaaaagtccgggttcaaatcgaaatcaacatgttcctgccagtcttccgccggatcgaataactccgcgccgccgcgctcttcaaactgaagattgaacagcaggacatcagctggatcgagattgtcggcagccagttcgagaaaaatatcgtaggcctgttcaagcgtttcatcttcagtcaggcgattgtttagatccatatccatagttactacctgtttaacctctgttggcgacgttttacagcaacggactgaagaagtaaaacagtcgctcggcgacacgttgccataatggacgttttagccataaacgggcatcgagcagacgactacggctaatataatcgtcctgaacggcggcgaggtcagcaccaaaacctttatcgtcgattgccagggtaatctcgaaatttagccacagactacgcatatcaaggttaactgtgccaaccagacttagttcgccatcgaccagcacgctcttggtatgcagtaacccgccttcaaactgataaattttaaccccagcagccagcagttccgtaaagaatgcgcgactggcccagccgaccagcatgctgtcattttttcgcggaaggataatactgacatccaccccgcgctgcgccgccgtgcaaatcgcatgaagtaaatcatcgcttggcacaaagtagggcgtggtcatgatcaaatattcacgcgcgctataagccgcagtcaataatgcctggtgaatgagatcttccggaaagccggggccagaagcaattgtgtgaatggtgtgaccgctggcctgttcaaacggcataatattgacatctggtggtggcggcagaatacgttttccggtttcaatctcccagtcgcaggaataaataatccccatcgcggtggcgatagggccttccatacgcgccatcagatcaatccattgccctacgcccgcatcttgtttgaagtagcgaggatcgaccatattcatgctgccggtgtacgcgatgtaattatcgatcatgatcatcttgcgatgttggcgcaggtccatacggcgtaaaaacacacgcatcagattgacctttaaggcttcgaccacttcaataccggcattacgcattagctcgggccacgggctgcggaaaaaagccacactcccggcggagtcgagcatcaatcggcaatgaatgccgcgtcgcgcagccgccattaaactttcagccacctggtccgccatgccgccgggctgccagatataaaacaccatctcaatattatggcgcgcgagctggatgtcgcggattaacgcctgcatcacatcatcactctcggtcatcagttgtagctgattccctttgaccccagcgatcccctgacgacgctcgcaaagcttgaataatggcgcagcgacactgctattttcttcggcgaagatatgcttacaggctttaaggtcgttaagccattttgcggtggaaggccacatcgctctggcgcgctcagcgcggcgtttgcctaaatggagctcgccaacggcaagataggcaataattccgactaacggcagaatgtaaataatcaacagccaggccatcgcggagggaactgcgcgtcgtttcattagaatgcgtaaagttacgcctgcaatgagcaaccagtatcccagaatggccaaccaactcaccaacgtataaacggttgtcatagattagaaatccttttgaaagcgcattgttatgagtttacgcatatggattcatctggcaaataaaaacgcgggaaaagcactggtcagcgtcgggggtgggggtataatgaccattctgttattgcatagagtagttaacatgaagcggagtagaacggaagtggggcgctggcgcatgcagcgtcaggctagccgacgtaaatcgcgttggcttgaggggcaatcgcgccgaaatatgcgtatccacagcatcaggaagtgcattctaaacaaacagcgtaactcgttattgtttgcgatctacaatatctaaatgtactgggcaccattgcggtgcccaataagtttactcttccgtctttaaactttatttttgcgcgctttctttactgtcagctttcgtttctagttcatcgttatcgctgaaaataccatgaccactgttcaacaacatactaacgagcatatcattattaatctcttcaccatttaaaactcgcgccagaatttcgctgccaaacagttgcggactgagaatgatatccggatgtaccatcttaatcttattcaggtttttgctatcactgacggcgagaactgttttgacatcactgctcatatcttttgcgctgagtacaacaaacgcgttatctgcatcgttatcactcagcgccagaatggcccggcaacgatcgattcccgctttctttaatacagaactgtcattactgtcaccggggataacatcagcattatcgcctaagcgttgctcaagttgcttgatatcatcttcaggcaagttgctgataaccgttacgttttgtccgcgttgattcagttgcaggatcgtattgatggcgagaatgctatgtccgcaaacaataaaatgatctttacgatgcattgtatgattgtttccttttacaagtttgttgaatcccccgcggataagcggaccaaaaatactggtcatagatgtggcaaaaacggtaatgccggaaataatgacgctaatagtgaacaatcgtgcactttcagaaacagggacaatatcgccatagccgacggtactcatggtttctatgctaaaatagaacgcggtcatcaaactttctattcgcggattaaaaccttcgcttaaataaagcgcaccgtaggtactgtaaaacagtaatgtcgtgaaactaataaatgcaaaaattgtcccggctgcggcgctactgtgggagaagtctttgcgcagtatcagcaaaaacaccagcgtaaaaatgcaaaatccaatactaaatttcagccagggataaaaatgcagggtgtaaattagcgctatcaacaacaaaatgatactgattgcccatgcgagctttgcccggaacagtaagccaatggagttcaggacaagaaagacgccgagcataaagagtggggcgtttgccagcaaggagagatccaactcactaaatgctttgatatggaaaatatcaagcaaattgacgctcataccatagattgttttaaaaataagcaatccatttaaaaagacggccagcgcgagaatgtcgtgccgaagggtcacccataaatttgttgctgtttgtttgaatgtagcccagtgactcactgatacctctgtaaccacaattttgtttaattatcttagcgtgcacattttctgaacatacatgcagcgcgtgaatgtgttaaacaatagtagatgactttatccgcagtaatcaaaggatttgagcgagcaactgtacctcaggaaaggtcatttttcctgaatatgctcacatcatataaagaaatacagataaagttattatctgcttgtggtggtgaatgcactgaccggctataaggaaaggccaaacaagaacacggttgcaaaaaccgtgcccttaaatattgaatctctattcagaacactttcttaaatggtttcacactaacgtgttcatagactcctgccgctacgtacgggtcagcatcggcccaggcctgagctgcttccaggctttcaaattcagcaataacggtactgccagtaaatcccgcagcccctggatcgttactgtctaccgctggcattggaccagctgtcaacaaacgaccttcatcatgcagtaactgtaaacgtgctaaatgtgccggacgaacggaaaggcgtttttcgaggctatcagctttgtcttgagcgtaaataacatacaacacgggcacaactccttgttcgggaaagttgtaaagtacgttatttgaaagggcgaagatctgcaacggaaagatgatgtctttgttaaggccatgcataaagtaagggtaattacgccaaaaatgacattttcactgatcctgatcgtcttgccttattgaatatgattgctatttgcatttaaaatcgagacctggtttttctactgaaatgattatgacttcaatgacccttgatttacctcgccgcttcccctggccgacgttacttagcgtctgcattcatggtgctgttgtggcgggtctgctctataccagcgtacatcaggttattgaactacctgcgcctgcgcagccgatttctgtcacgatggttacgcctgctgatctcgaaccgccacaagccgttcagccgccaccggagccggtggtagagccagaaccggaacctgagccgatccccgaaccgccaaaagaagcaccggtggtcattgaaaagccgaagccgaaacctaagccaaaaccgaagccggtgaaaaaggtacaggagcagccaaaacgcgatgtcaaacccgtagagagccgtccggcaagtccgtttgaaaatacggcaccggcacgcctgacaagtagtacagcaacggctgcaaccagcaagccggttaccagtgtggctagtggaccacgcgcattaagccgtaatcagccgcagtatccggcacgagcacaggcattgcgcattgaagggcaggttaaagttaaatttgacgttacgccggatggtcgcgtggataacgtacaaatcctcagtgccaagcctgcgaacatgtttgagcgtgaggtgaaaaatgcgatgcgcagatggcgttatgagccgggtaagccaggcagtgggattgtggtgaatatcctgtttaaaattaacggcaccaccgaaattcagtaagcagaaagtcaaaagcctccgaccggaggcttttgactattactcaacaggtaaggcgcgaggttttccttcaggatcaaccgcgacatacttaaataatgcttctgtcgctttatagcgttgcccaattggttcagacgctacttttttcacccacacttcaatattaatgctgacgcttgtcgtccctttctggacacagcgtgcatagcagcacaccacatcgccgaccgcaaccggccgtaagaaagtcattccttcaacccgcacagtcactacgcgaccgtgggcaatttcttttgccagaatagcgccgccaatatccatttgactcattaaccaaccaccaaagatgtcaccattggcattggtatcggcgggcatggctaaagtacgtaaaacaagatcgccctgagggacgttatgtgttgtagacatggtaaaaccgacttaaaaggaaaatcacaggcgcgatgctactatgattttcctgaggagaacagaggagatacagcgccagccccgaaggactggcagtctggttaggatttatcttcctgcggcatgtggcggtagatatagataccgcttaacaatgtgaagattaaggtaagggcggtcaggccaaagactttaaagttgacccaaatattttgcggcagccagaatgcgatgtagatgtttgccagaccgcaaaggataaagaaaacagcccaggccagattcagcttgctccataccggttgcggcagcgtgagttctttacccagcatccgctgaattagcggctttttcatcacccattggctgactaacagggctcccgcaaatagagcataaatgacagtaaccttccatttaataaactcatcattgtggaagaacagcgtcaagccaccgaagacgaccaccagaacaaaagtgatcagggccatcttctcaaccttacgaaagcgaacccagctatagataagcacaatcgccgtggcgacgatcagcgccgcagtagccgcatagatgtcataaatcttgtaaaacgcgaaaaagacaaccagcggtaaaaaatcaagaaactgcttcattttacgattccgtaatcaaatgcttaaggttattggcgaatcaacatatacaggcggaacagatagatgagcaatatggcactaatcaggttgctcaaggtgttcgccagtacggcaccaatttccggggttaatgcggcaaaagaagaggcaaaaagcagcaacagtgtttttgccagcaaccagctcagtactgcgggtgccaccagacgcatattcgcccaagtcagccgcatactgctacgcatgctggcaaaaacgcccattttgtcctgtaccaacatcaccggtgccagggccagtaaaatggccatgataattcccggaacgaccaccagcatgatgccaatctgtactaaaagggtagtcagaaaaatcagaataaataactttggcaatatcggcgcactggcaccaatagctcgcagcgcactgactctctgacccgcagacaccagctggataattaatattacgcctccggcgagaatggcgttaccgattaatccactaaaagtggacgccgcactagcctgcagcaaaatttgttgctgttccggactcatattctgaaccaggtcgaacaacccactactgccgctaacgggcacgcagtcattgagctgcgcaagctgtgcatcactgggactgaaagcatgccctaacaccactgtgataaacgcacatagcaagcttaccaacagaatggtcataaattgattacggaagaaatttccggtgtcacggtatacggactgcgccgtgatagacatgcactctccttgagttttatgcaggtgttaattagcgggcaattgtaccctggttaagcctcgggtggcagcatcaggtcttgtatggaaaagcatatctttgtaaagcggaggtaattgctggccttcaggcatgggcaaatcgcggcaagtggcgaccgagttaatatttgcgtagcgaaaatatttaaaaattgatttaaatcacattaaccaggattctcaatgcaacttctaaattaatccagatcaataaagggtgaattatcatatgtaatgtgatctatgtaggatcatttgttactccaatgtaggtatattcgtcacgtttttataaccataacgacggagcggatatgaaaaagttaacagtggcggctttggcagtaacaactcttctctctggcagtgcctttgcgcatgaagcaggcgaattttttatgcgtgcaggttctgcaaccgtacgtccaacagaaggtgctggtggtacgttaggaagtctgggtggattcagcgtgaccaataacacgcaactgggccttacgtttacttatatggcgaccgacaacattggtgtggaattactggcagcgacgccgttccgccataaaatcggcacccgggcgaccggcgatattgcaaccgttcatcatctgccaccaacactgatggcgcagtggtattttggtgatgccagcagcaaattccgtccttacgttggggcaggtattaactacaccaccttctttgataatggatttaacgatcatggcaaagaggcagggctttccgatctcagtctgaaagattcctggggagctgccgggcaggtgggggttgattatctgattaaccgtgactggttggttaacatgagtgtgtggtacatggatatcgataccaccgccaattataagctgggcggtgcacagcaacacgatagcgtacgcctcgatccgtgggtgtttatgttcagtgcaggatatcgtttttaattccgcacaaaaacgaccccgtaatatacggggtcaataaggacatggtataaagggtattatttcttcgcttctacgccatcagtttcagagcgaattaaaaatttctcagttgtttgcggaatattctgaatcagccagtcggccatttgcttttcctcatttaaaatcgcttcgatggttggaatactagctgtatcaccggcattttttgctgctgctaatagactggtgtaacaggcgatttcaaattgctcgaagacatatccgctaatagagcctttgactatttcatcagaagggaatataccaccgatactctgcccaagcgcagccattttactcatggaatctttaatgacactacgactaatgtcattacgatcaagaatagtttccagttgaacaatctggtttttggtttcactaagatgttgttcaatacgagcgcgtagttcaggataattatctatacggctggccatggattcaagcatagattcggcttgcttttccattgcgtgggcgtcacgtaaccagtcatgataatgttcaatacgattcatgaaaatgtcctctttataaaatgactaaaagttaaaattcatatttcaggctttattttcggctttcttatttacgttattaatggccagatcagtcagtttgatgtcggtggccttttcttcttccagggtttctttcagaagcttcgctgctttacggtaacctaattgttcagccagcgtcgctaatgtcccgtaactggcaatctcataatgctcgactttctgtgctgcggcaatcagtgcggcatcacgcacttcgtttttctcggtactttcgatgacctcattagcttcttcaataagaccttccattgccacacatttcatgcgcttaattttcaggttgctttcggactccacaacttgatcaatacgttcaatctgtccatgagtttcctcgaggtgcgcatgaaaagcctgacttaatttttcattacttgttgctcttgcgagttttgccagtgcccgggttaattgtttttctgcgctgtaggtatcactaagcaggtgaataaatacatcttcaatggtcttcatattcatatttttctccagtgaaatcactgcgagccatacggcccgcagatgcaattatctttatcagctgatattaataattaacggtgaatcaggatttgccacttttattaccaccgctttgttgaccgccttttttacccgcttcagatgcgcgttgcggatcatttttaaaattaccgccgctatgctgaccgcctttacggcctgcgtcggatgccttctcacggtcttcggcgaaatttccactaccaccacgatgttcggccatgttatttctcccgttgcgttgcattgtttcattaatatgagtgttgtgtgtcgacactcattaaaattagtcgctaatgagaattagtcaaattaagcgcaacgagaagatagagggaaaatatattttgaggaacattctggatatattaacaattacctgaggaataagtgacttagagaaaattattgattttactggtgttatgttgcgggattaatttgtttgattatattactgttgggcggaaaaatgacgtaagttgacgttcgaccggggtaagcgaaacggtaaaaagataaatattaaatgaatttaggatttttccggcttcattaaagaaagttaaaatgccgccagcggaactggcggctgtgggattaactgcgcgtcgccgctttcatcggttgtacaaaaactttcagtgccgccagcattttctctggctcattaatatgttgctcgatgattttaacaatggcgctaccagaaatcgcgcccgcagctcctgcatcaatcgctgcttttacctgatccggggcggaaataccaaatccctgcaatggaggtgcagcgttgtactctttcagcttcgcaaccagatgattgaggggtaacgcggcgcggttttctgcgccggtcacgcctgctcgactcagcaaataggtgtaaccacgaccgtaagaggctatctggcgcagcaggtcgtcatcggcatttggcgggcagatgaagataggtgcgacattatgacgcaacgcggcctggcggaagggcgcggactcttcaactggcacatcggcaaccagcacgctatcgacgccgactttttcgcactgggcataaaactcatcaatgcctttgttaaacaccagattggcatacatcaacaggccaatgggaatggtcgggtgtttctggcgaatcagtgccagcatttcaaaacattgtgccggagtcacacctgccgcaaaggcgcgcagagtggcgttttgaatcgtcgggccatccgccagtgggtcggagaaggggatacctaactccagcgcgtcagcaccggcttcaattagcgtatcgataattttcaaactctgctcaatgcccggatcaccgagcgtgacgaaaggaacgaatgcgccttctttgcgctccttcaactgggcaaacagagattcgtagcgttccatcagatttcccctcgtgctttcaaaatatcgtgaacggtgaagatgtctttatcgccgcgaccggaaaggttaaccaccagtagctgctctttatccgggttttcgcgcatcattttcaacgcatgggccagggcgtgggaggattccagcgccgggatgatcccttcgtgcaggcacagcgttttgaaggcttcaagggcttcatcatcggtaatagacacgtaatcagcgcgtccagtgctgttaagatacgcgtgttgtgggccgacagacgggaaatccagtccggcggagatggagtaagattcttcaatctgcccgtcttcggtttgcatcatcggcgctttcataccgaaatagatacccacgcgaccatgttttagcggtgcgccgtgctcgccagtttcgataccgtgaccacctggctccacaccaatcaggccgacgttggtttcattgatgaaatcagcaaacatgccgatggcattgctaccgccgccaacacaggcgataacggcatccggcaggcgaccttctctttccagaatctgcgctttggtttcttcgccaatcatccgctgaaactcacgcacaatggtcggataaggatgcgggccagctgcggtgcccagcatatagtgcgcggtttcgtaactaccggaccagtcgcgcagcgcctcgttacaggcatctttcagcgtcgcggaaccgctatgcaccgggatcacttccgcacccattaagcgcatacgaaaaacgttagggctctggcgttcaacgtctttggcacccatataaatacggcatttcaggccgagcagggcgctggcaagggcgctcgccacgccatgctgaccggcaccggtttcggcgatgatttcggttttacccatccgcttcgccagcaacgcctgccccagcacctggttagttttatgcgcgccgccgtgcagcaaatcttcacgcttgagatacagcgtggtgttcgtcccggctgtaatgttctggcatttggtcagcgcggttggacgcccggcatagtttttcagcaggtcgttgaactgagcctgaaattcaggatctttttgcgcactgacaaaagcttcttccagctggcgcagagcaggcatcaggatttgtggcacgtacatgccgccaaactcaccaaaataggggttaagtaatgttgtcattgttcctttccttaatatgcgcgcagcgtctggaaaacgctggccaaaagacgtgcgtctttgatgcccggttggctctctacagcagaattaaaatcaagtccggcgcagccggtttgtgccgcttccacgcagttatctgcgcctaagccccccgccagcagaacgttgccaaggctttgaccatttaatagactccagtcaaaacgttgcccgcttccaccctggccgttgtctaaaacatatttatcaacgtgctgaaactcgcgggcgggcagggtttcaccgacgcttaatgctttccagatggcaacatgtgctggcagagcttcacgcagcgtatcgatatacagctgttcttcattaccatgcagttgcactgccgccaggcttaacaccttagctttgtccaccacatcggcaatatcgtgattgcggaacacgccaacatactgcaacggtgccgcagccatcacttcctgcgcctgttcaacgttgacgcaacgcggacttgtcgcaacaaaaatcaacccaccgtaaatcgcgcccgcgtcataagctgctttagcatcttgcccacgcgtcaggccacatactttattctcacccagcaacacccggcgcacggcggcgtgcaaatcgtcatgggccatcaacgcgctaccaatcagaaaaccgttagcgaagtggcttaactcgcgcacctgagcgtaagtattgatgccggattcgctgattaccgtcacgttgtgccccagtttcggcgcaagctcgcgggtacggttgagatcaatgctcaaatcacgcagatcgcggttgttgatgccaacgacctttgctcccaatgcaatggcgcgctcctgttcctcttcattactgacttcggtcagcacccccatctccagactgtgagcgacggcggcaagctggcgatattggtcgtcatccagtacactaagcattaataagcaggcatcggcctggtaatagcgcgccagatagatctggtaagggtcgataatgaagtctttacataaaatcggctgcggggcgatttggctgacgatggggaggaaattaaagctcccctgaaaatatttctcatcagtcagcacgctaattgcgctagcgtaatgtttataaatggcggcaatgcgtgctggatcgaaatcatcacggatcacgcctttactcgggctcgctttcttgcactccagaataaacgccgtgcgcgcaccctgtagcgcatcataaaaatgtcgcgtgctcggctgaacctcattctgaaaactggccagcggttgctgctgtttgcgggcttctacccaaatcgccttgtctgcgacgattttcgctaaaacggtttgcatcatttaccctcgtgccgccagtgcggtgactctgtcgtaagcggaaccactgcgcagtacctcaagaacggtttgcgcattggcttgcagatcttcatggccatgcaggcgcattaacatggcgacgttcgcagcgacggctgcttcatgggcggcgtcgcctttaccttgtaacaaacgtgttaaaatgtcacggttttcttccggtgttccgcctgccagttgctcctggtggtagggtgtcaggccaaagtcttctgcggtgagctgatagcttttaatttcgccgtcatgcagttcggcaacgattgtcggcgcgtgtaaactaacttcatccatcccgccgctgtgcaccaccgccgcgcgttgataccccagcacgcgcaaggtttcggcaatcggcagcaccagttccggactataaacaccaattaacgccagcggcggatgcgccgggttaatcaatggccccagcacattgaacagggtgcgggttttcagttgctggcgaaccggcatcgcgtggcggaatccggtgtgatacttcggcgcaaagaggaaacatacacctaactcatccagcgcctggcggcttttatcggcgttcatatcaagattaataccgaacgccgccagcagatcggagctaccagatttactggagacgctacggttgccgtgtttcgccactttcagcccacaggccgcggcgacaaacgcactggcggtagaaatattgatactgttgctgccgtcaccgccagtaccgacgatatcagcaaacagataatccgggcgcgggaacggcgctgcgttttccagtagcgcggttgctgccccggcgatctcgttcgggtgctcaccgcgaattttcatgctcaccagcgccgccgccagttgttccggcttcagctcgccacgcaccaccgcactaaacagctggtggctttcttgttggctaagcgtctgcgcctgatacagtttttccagaatcggttgcagcgtgttggctggctctagtttctgctgcgcccaggccagcgtttgttccagcaggcgagcgccctgggtggtgagaatggattccggatggaactggaatccacaaacgcgatccgcatcgtgacgtactgccatcaccatgccattaaaatgggcgttgatggttaaaccggccggaatgttactgccaaccaggctgtgataacgcgccaccggcagcgggtttgttaatccggcaaacatcgcctgaccgtcatgttcaatgctggaggctttaccgtggagaatttcgcccgcctgaccgacatagcccccgtaagcttcgacaatcgcctgatgtccgaggcaaatgccaataatgggcagcttgccacgcaagcgggtgaggagttccggcatacaaccggcttcgctcggcacaccggggccaggagaaagcatcagcaccggattgctcatggtcgccaggcgttcaattaaggtttgcgccggaatatggttgcggtaaatcaccacgttatgcccattgctgcgcaactgatctgccaggttgtacgtaaaagagtcgatattatcgagcagcagaatgtcagccatcagaaagtctcctgtgcatgatgcgcggtggcaatagcgcgcagtacagcgcgggctttgttacgggtttcgtcggcttcgctctgcggaacagaatcaaggactacaccagcacccgcttgcacggtggcgataccgttttccaccagcgcgctgcggatcacaatgcaggtgtcgagatcgccatgcgcggtgaaataacctaccgcgccgccgtagctgccgcggcgacgaccttccgcctcggcaattaactgcatagcgcgtactttcggcgcaccgcttaacgtccccatattcatacaggcgcgataagcgtgcagggcgtcaagatcgtgacgcagttcgccgactacgcgagagacgaggtgcatcacataggaataacggtcaactttggtgagatcggcgacgtagcggctgccgggggtgcaaatgcgtgccagatcattacgggcgagatcaaccagcatcagatgttcagacagctctttatgatcggtacgcatttccagttcaatacggctgtcgagatctctgtccagactaccatcggcgcgacgaccgcgtgggcgtgttccggcaatcgggtagatctcaatctggcggctggtggcatcatacttgaggctgctttccgggctcgcgccaaatagggtgaaatcattatcctgcataaaaaacatgtacgggctgggattactctttttcagcacgtaataggccgccagcggactcgggcagggcagagagaaacggcgagatggcaccacctggaaaatttctccagcgcgaatcgctttttgcaacaaacgcactacgccaccgaactcttcatcgctctgattacattcacaacgcatatgcggcacggaaaccactggcagcggcggcgcggcttcggtcagttgctgacgtagttcgttcaggcgagcagtgagacgttgtttttcttcttcattcggagcaaacaggctggcctgaatacgggtgctttttttctgatggtcaatcaccatcagcgtttcagcgagataaaaacagaaatcagggcagttattttccgcactcagttgcggtaaatcttcaaatcccgccacaaggtcataagagaacaggccgccgaagaacatggcttctcgttcttccttcggtacattcaacagattctgcaataaacggaaagcgtcaaaaacgctaagggagcataagcgggcgtcttcatccagcagtggactgacaggggggaagcgcagcacacggcagtttggactttgttcactttccacacccgcaggcagggcgttatccagtagtgccaggagggcttcgccgttgccggaaagtgcctggattgtgacagtgtcacctaaagctgtaatgcgcagcgcactgtctaccagcagcaggctttttaaatcatctttgctgtcgatatctgcggattccagcagcagcgttgccggacgatccccacacaactggtgaaaaagcgcggtgggattgtcgcgataagcgccttcgcaggttagcagttcgagagtcggtttttgtgtttgcattgttattctctaattttgttcaaaaaaaagcccgctcattaggcgggctgggtatctgattgctttacgcatggtgaatacactgcccgtttcaggaagtgcgccaccaacctttcagtacgaaaattgctttcattgtcgataccctttttacgtgaacttgcgtactagttaactagttcgatgattaattgtcaacagctcatttcagaatatttgccagaaccgttatgatgtcggcgcaaaaaacattatccagaacgggagtgcgccttgagcgacacgaattatgcagtgatttacgacctgcacagccataccacagcttccgatggctgcctgacgccagaagcattggtgcaccgtgcagtcgagatgcgcgtcggcaccctggcgatcaccgaccatgacaccacagctgcaatcgcgccagcaagagaggaaattagtcgtagcggactggcgttgaatcttattcccggcgtggaaatttccacggtctgggaaaatcatgaaattcatattgtcgggctgaatattgatattactcatccgctaatgtgtgagttcctcgcgcagcagacagaacggcgcaatcagcgggcgcagctgattgccgaaagacttgaaaaagcgcaaatacctggggcgctggaaggcgcacaacgactggcgcagggcggcgcagtgacgcgcggtcattttgcgcgtttccttgttgagtgcggcaaagccagtagtatggcggatgtctttaaaaagtatctggcgcgcgggaaaaccggatacgttccgccacagtggtgtacaatagaacaagctattgatgtcattcatcattctggcggtaaggcggtgctagctcatcctgggcggtacaatcttagtgctaaatggctgaaaagattggttgcgcattttgccgaacaccacggtgacgcgatggaagtcgcgcagtgccagcaaagccccaatgaacgtacccagctggcggcccttgcgcgtcagcatcatttatgggcaagtcaaggatctgattttcatcagccatgcccgtggatcgaactgggtcgtaaactctggctgcccgcaggcgttgaaggcgtctggcagctatgggaacagccgcagaacaccacagagagggaattatgagccagtttttttatattcatcctgataacccacagcaacgtctgatcaaccaggcggtggagatcgtgcgtaaaggcggggtgattgtttatccaactgattccggctatgcgctcggctgtaaaattgaagataaaaacgcgatggagcgtatttgtcgtattcgccagctgccggacggtcacaactttaccctgatgtgtcgcgatctttctgaactcagcacctatagttttgttgataacgttgcgtttcgtttaatgaaaaacaacacgccgggcaactataccttcatcctgaaggggacgaaggaagtgccacgccgtctgttgcaggaaaaacgcaaaaccatcggtatgcgtgtgccttctaaccctatcgctcaggcgttacttgaagcattgggcgaaccgatgctttccactagcctaatgctgccaggcagcgaatttaccgaaagcgacccggaagaaattaaagatcgtctggaaaaacaggtagatttgattattcacggcggctatctcgggcagaaaccgacaacggttattgatcttaccgatgatacgccggtcgtggtgcgtgaaggcgtaggtgatgtgaagcctttcttataacaaattgcgttccacggatggaagactatggcagggaagtttcgctgcattttgctgttgatagcagggctgtttgtaagttctctaagttatgcagaaaacacggagatcccttcttatgaagaagggatcagcctctttgatgttgaagccactctgcaaccagatggggtgctcgacatcaaagaaaatattcattttcaggcgcgaaatcagcagattaagcacggcttttatcgtgatttaccacgactatggatgcagcctgatggggacgctgcactgctgaactatcatattgttggcgtcacccgtgatggtattcctgaaccctggcatcttgactggcatatcgggttaatgagtattgtcgtgggcgataaacaacgtttcttgcctcaaggcgactatcattatcaaattcattatcaggttaaaaatgctttcctgcgtgagggggattctgatctgctaatctggaacgtgaccggtaaccactggccgtttgaaatttataagacccgtttttctctccagttctctaatattgcgggtaatccatttagcgaaatcgatctttttaccggagaagagggcgacacatatcgtaatggccgcatccttgaggacggaagaattgaatcccgcgatccgttttatcgtgaagatttcacggtcctctaccgctggcctcacgctttacttagcaatgccagcgctccgcaaacgacgaatattttcagccatcttcttttaccctccacgagtagcttgttaatttggtttccgtgtctgttcctggtttgtggatggttatatctctggaagcgcaggccgcaatttacgccggtagatgtgattgaaaccgatgtcattccgccagattacacgcccggcatgttacgtctcgatgcgaagctagtttacgacgataaaggtttttgtgccgatatcgtaaatctgattgtgaaaggaaaaattcatctggaagatcagtctgacaagaaccagcaaatcctgattcgtgttaatgaaggcgcgaccagaaataatgcggtattactgcccgcagagcagttattactggaagcgttatttcgtaaaggcgataaggtcgttcttacggggagacgcaacagagtcttacgcagggcatttttacggatgcagaaattttatctgccgcgtaaaaagtctagcttttaccggtctgatacttttttgcaatggggtggactggcaatattggcggtcattctttacggtaacttgagtcctgtaggctgggcaggaatgagtctggtgggcgatatgtttattatgatctgctggattattccttttttattttgttcccttgagcttttgtttgcccgcgatgatgacaagccttgcgttaatcgtgtaatcatcactttgtttttaccactgatttgtagtggcgtggccttctattctctctacatcaatgtcggagatgtattcttttactggtatatgccagcgggttattttaccgctgtttgcctgaccggttatctcactggcatggggtatatttttctgccaaagtttacccaaactggacagcaacgttatgcccacggtgaagctatcgttaactatcttgcgcgtaaagaggcagcaacacacagtggacgtcggcggaaaggggaaacacggaaactggattacgcgttgctaggttgggctataagcgcaaatttggggagggaatgggcgttacgcattgcccctagcctttctagcgcgattcgcgctccagagattgcccgtaacggcgttttattcagtttacagacgcacctaagttgcggggccaataccagtttgttggggcgaagttattccggtggtggtgctggcggcggcgcgggtggcggaggcggtggtggctggtaattaagctgatgttaatcgaaacaagctttaaccataaagatagtgtagtatgttgcgcctcaaagccaggccgataaacgtcgagtcgtttacttaaggcctgaagagttcaaacagactttactatcagtgagtcagatgtaagttctgactcactgttgcacaaaagcatatcagacgcctgggaaggcgacaccaaaaggaagctctatgagcgaaaagctacagaaagtgctggcgcgtgccggccacggttctcgccgtgaaatcgaatctattattgaagccggtcgtgtgagtgttgatggcaaaattgctaaactcggcgatcgtgttgaagttacccctggattgaaaatccgtatcgatggtcacctgattagcgtacgtgagtccgctgaacaaatttgtcgcgttctggcctattacaaaccggaaggtgagttgtgtacccgtaacgatccggaaggacgtccaacggtgtttgaccgtctgccaaaactgcgtggcgcacgctggattgccgtgggtcgcttggacgttaatacctgtggtctgctgctgttcaccaccgatggtgaactggcaaaccgtttaatgcacccaagccgtgaagttgaacgtgaatatgccgtgcgtgtatttggtcaggttgacgacgcgaaactgcgtgatttgagtcgtggcgtgcagttggaagatggtccggcagcttttaaaaccatcaagttcagcggcggcgaagggatcaaccagtggtacaacgtgactctgaccgaaggccgtaaccgtgaagttcgtcgtctgtgggaagcggttggtgtgcaggtgagccgcctgatccgtgttcgttacggtgatatcccactgccaaaaggtctgccacgcggtggctggacggagctggacctcgcccagactaactatctgcgcgaactggtggagctaccgccagaaaccagctctaaagtcgctgtagaaaaagaccgtcgtcgcatgaaggcgaatcagattcgtcgtgcggtgaaacgtcacagtcaggtgagcggcggtcgtcgttctggcggacgtaataataacggttaatcaaagtatgccggacgtcatatccggcatttttacagattaataatcgatccctatctgcgcttttacaccggcatcaaacgcatgtttgacggggcgtaattcacttaccgtatctgccagttcaagaatatcccgatgacaaccacgacccgtgataatcaccgtctgttgatgtggacgttcatttaacgcctgcaccacttcttccagtggcaaatagtcatacgccaccatatacgtcagttcatcaagcaaaaccatatccagactggaatcagcaagcatccgctttgcatgttgccagacttcgcggcaggcggcggtatcagactcgcggttttgtgtatcccaggtaaagcccgttgccatcacctgaaactcaacgccatgtggctccagcagattgcgttcgccattaggccaggtgcctttaataaactgcacgacgcctactttttttccgtgaccaactgcgcgtgttgccgtaccaaatgccgcggtggttttgccttttccattgccggtaaagacgatgataataccgcgttcatcctgggcctgggccacacgagcatctactttttctttcactcgctgctgacgctgttggtagcgttcatcactcattgggaaattcctggtttacggcccggttgggcgtcaaaggtcatgccggttttacggcggctgtcatcgcccatcagccagaggtagagcggcatgatatcagcgggtgttttaagtttctgtggatcttcggtcgggaaggcgctggcacgcattgcggtgcgcgtaccgcctgggttaatgcagttgacacgcaggcgctgctgatattcatcggccagtacctgcatcatcccttcggtggcaaatttgctcgctgcatatgcaccccagttggctcgtccctgacgtccaacgctactactagtaaagaccagactaccggcgtcgcttttgagtaataaaggaagcagtgcctgggtgagcataaaggtggcattaacgttgacctgcatgacgtcctgccagacctgcggattttgttcgctcattgggcaaacatcgccgagcaatccggcattatgcaaaacaccatccagacgcggataattaacggcaatgcgctgtgccagttgttggcaattttcggacgtgcaggtcagcaaatcgagaataaaccactgtggctgacgcccagtttcttcgtttatgtggctggctacctgacgtaatttttcttcattacggcccaacagaatcactgtcgcaccatagcgtgcatacgtcatcgcggcttcacgaccaataccatcgctggctcccgtcaccaggataatgcgatcattgagtaaatcttgttttggctggtaatgcatggctactcctcaacgacgttgtctgtcgcgctgccagtgtactttatgactttggggctttatgcctgaaacagaagggcatttcaatcagcctggggcgataacaccgcaaaatggatactttgtcatactttcgctgcaataacatctctgcgagacggcttaacatgcctgttgtaaactgtgagccaaagcgttgtttaaccaaggtggggactcgtggaattgttgtctgaatatggtttgtttttggcgaaaatcgttaccgttgtgctagcgattgcggcgattgccgccattattgtcaatgttgctcaacgtaataaacgccagcgtggcgagttacgggtcaacaatctcagcgaacagtataaggagatgaaagaagaactggccgcggcgctgatggacagtcatcagcaaaaacagtggcacaaagcgcagaagaaaaagcataagcaagaagcgaaagcagcaaaagcgaaagccaaactgggcgaggtggcaactgacagtaaaccccgcgtctgggtgctggattttaaaggcagcatggacgcccatgaagtgaacagcctacgtgaagagataacggctgtactcgcagcattcaaaccgcaggatcaggttgtgctccgtctggaaagccctggtggcatggtgcatggttacgggctggcggctagccaactgcagcgtctgcgcgataaaaacattcctttaactgttacggtagacaaagtcgctgccagcggcggttacatgatggcctgtgtggcggacaaaattgtttccgcaccgtttgctattgtgggttccattggcgtggtggcgcaaatgcccaactttaaccgcttcctgaaaagcaaagatattgatatcgaactgcacactgccgggcagtataagcgcacgctgacgttgctgggtgaaaataccgaagaagggcgggagaaattccgcgaagagttgaacgaaacgcatcagttgtttaaagattttgtgaagcgtatgcgtccttctctggatattgaacaggtggcaacgggtgaacactggtacggacaacaggcggtagagaaaggcctggttgatgaaatcaacaccagtgatgaagttattcttagcctgatggaaggccgtgaagtggtcaatgtacgctatatgcagcgtaaacgactcattgaccgattcaccggcagcgcggcagagagcgccgatcgattgttgctacgctggtggcagcggggtcaaaagccattgatgtaaaagacaaacgcgaggctaagacctcgcgttttgctttaatcaaccagatgatatttttcactaagcacatgggccaggtgtttgaacatattaaacaccgcggtgcttttggctgttggcaatccttgttcatctaaaaagtagtcgccggtaaataccagcacgccattacgctgcgtgacgccggtggcttcaatccctgcgagcgtatcctcatgctcacgaatgattttgttggcctctttcaacagcgtttcgcggtcgatgggttgtgtctctttgttcattatttactccttaaacaaggacattagtctacgccaggcatggcttgcagacaaatataccacgctggtggcaagagcgccttactggcaactttggattttgcatgctaataaagttgcgtatcggattttatcaggtacagtgtgacgctttcgtcaatctggcaatagatttgcttgacattcgaccaaaattccgtcgtgctatagcgcctgtaggccaagacctgttaactcagtcacctgaattttcgtgaacagagtcacgacaaggggttgatatccgcagagagcgagtccatatcggtaactcgttgccagtggaaggtttatcaacgtgcgacgcattcctggaagaatcaaattaggtaaggtgaatatgggtaaagctcttgtcatcgttgagtccccggcaaaagccaaaacgatcaacaagtatctgggtagtgactacgtggtgaaatccagcgtcggtcacatccgcgatttgccgaccagtggcagtgctgccaaaaagagtgccgactctacctccaccaagacggctaaaaagcctaaaaaggatgaacgtggcgctctcgtcaaccgtatgggggttgacccgtggcacaattgggaggcgcactatgaagtgttgcctggtaaagagaaggtcgtctctgaactgaaacaactggctgaaaaagccgaccacatctatctcgcaaccgaccttgaccgcgaaggggaagccattgcatggcacctgcgggaagtgattgggggtgatgatgcgcgctatagccgagtggtgtttaacgaaattactaaaaacgcgatccgccaggcatttaacaaaccgggtgagctgaatattgatcgtgttaatgcccagcaggcgcgtcgctttatggaccgcgtggtggggtatatggttagcccgctgctatggaaaaagatcgctcgtggcctgtctgccggtcgtgtgcagagcgtggcggttcgcctggtggtcgagcgtgagcgtgaaattaaagcgttcgtgccggaagagttctgggaagtcgatgccagcacgaccacgccatctggtgaagcgttggcgttacaggtgactcatcagaacgacaaaccgttccgtccggtcaacaaagaacaaactcaggctgcggtaagtctgctggaaaaagcgcgctacagcgtgctggaacgtgaagacaaaccgacaaccagtaaacctggcgctccttttattacctctacgctgcaacaagctgccagcacccgtcttggatttggcgtgaaaaaaaccatgatgatggcgcagcgtttgtatgaagcaggctatatcacttacatgcgtaccgactccactaacctgagtcaggacgcggtaaatatggttcgcggttatatcagcgataattttggtaagaaatatctgccggaaagtccgaatcagtacgccagcaaagaaaacagtcaggaagcgcacgaagcgattcgtccttctgacgtcaatgtgatggcggaaagcctgaaggatatggaagcagatgcgcagaaactgtaccagttaatctggcgtcagttcgttgcctgccagatgaccccagcgaaatatgactccacgacgctgaccgttggtgcgggcgatttccgcctgaaagcacgcggtcgtattttgcgttttgatggctggacaaaagtgatgcctgcgttgcgtaaaggcgatgaagatcgcatcttaccagcagttaataaaggcgatgctctgacgctcgttgaacttacaccagcccagcactttaccaagccgccagcccgtttcagtgaagcaagcctggttgaagagctggaaaaacgcggtatcggtcgtccgtctacctatgcgagcatcattagcaccattcaggatcgtggctacgtgcgagtagaaaatcgtcgtttctatgcggaaaaaatgggcgaaatcgtcaccgatcgccttgaagaaaatttccgcgagttaatgaactacgactttaccgcgcagatggaaaacagcctcgaccaggtggcaaatcacgaagcagagtggaaagctgtactggatcacttcttcagcgatttcacccagcagttagataaagctgaaaaagatccggaagagggtggtatgcgcccgaaccagatggttctgaccagcattgactgcccgacttgtggtcgcaaaatggggattcgcacagcgagcaccggggtattccttggctgttctggctatgcgctgccgccgaaagagcgttgcaaaaccaccattaacctggtgccggaaaacgaagtgctgaacgtgctggaaggcgaagatgctgaaaccaacgcgctgcgcgcaaaacgtcgttgcccgaaatgcggcacggcgatggacagctatctcatcgatccgaaacgtaagttgcatgtctgtggtaataacccaacctgcgacggttacgagatcgaagagggcgaattccgcattaaaggttatgacggcccgatcgttgagtgtgaaaaatgtggctctgaaatgcacctgaaaatggggcgtttcggtaaatacatggcctgcaccaacgaagagtgtaaaaacacacgtaagattttacgtaacggcgaagtggcaccaccgaaagaagatccggtgccattacctgagctgccgtgcgaaaaaagtgatgcttatttcgtgctgcgtgacggtgctgccggtgtgttcctggctgccaacactttcccgaaaagccgtgaaacgcgtgcgccactggtggaagagctttatcgcttccgcgaccgtctgccggaaaaactgcgttatctggccgatgcgccacagcaggatccggaaggtaataagaccatggttcgctttagccgtaaaaccaaacagcaatatgtctctagcgaaaaagacggaaaggcgactggctggagtgcattttatgttgatggcaaatgggttgaaggaaaaaataacctttaattctgtcaggtttttataaacaaagggtcgcgaaagcggcccttttttattgcatattattttttcttcacacctatacactaaggctataaatgatatagtggttatagttagcaccttttttattattaaatcgtattagtcacccgccaggtgtgacgaaaaaacgatgttctgatggcgtctaagtggatggtttaacatgaaattacaacaacttcgctatattgttgaggtggtcaatcataacctgaatgtcagtagtacagcggaaggactttacacaagtcaacccgggatcagtaaacaagtcagaatgctggaagacgagctaggcattcaaattttttcccgaagcggcaagcacctgacgcaggtaacgccagcagggcaagaaataattcgtatcgctcgcgaagtcctgagcaaagtcgatgccataaaaagcgttgccggagagcacacctggccggataaaggtagtctgtatatcgccaccacgcatacccaggcacgctacgcattaccaaacgtcatcaaaggctttattgagcgttatcctcgcgtttctttgcatatgcaccagggcagcccgacacaaattgctgatgccgtctctaaaggcaatgctgatttcgctatcgccacagaagcgctgcatctgtatgaagatttagtgatgttaccgtgctaccactggaatcgggctattgtagtcactccggatcacccgctggcaggcaaaaaagccattaccattgaagaactggcgcaatatccgttggtgacatataccttcggctttaccggacgtagtgaactggatactgcctttaatcgcgcagggttaacgccgcgtatcgttttcacggcaacggatgctgacgtcattaaaacttacgtccggttagggctgggggtaggggtcattgccagcatggcggtggatccggtcgccgatcccgaccttgtgcgtgttgatgctcacgatatcttcagccacagtacaaccaaaattggttttcgccgtagtactttcttgcgcagttatatgtatgatttcattcagcgttttgcaccgcatttaacgcgtgatgtcgttgatgcggctgtcgcattgcgctctaatgaagaaattgaggtcatgtttaaagatataaaactgccggaaaaataatttcttgcgttattttcggcaccttttatgtagcgaaggtgccggaatatattctcttttgttacttatttctataccgtgcacaatatttttatccctcatatttatagggtaaattacctgtaaagtagtgtctaattacccgcctcgcaaactccagttttcaaatatctatttcaggtcaaaagattgaattattcactggagacgattcgtaaattcgctggatttttgactaaagtttctttaggatttgtctcatcgtatgattaattacaccaatcgttcaacgtcttgctgataagtgatggcgattatatgaggttagcaatgccttctggaaatcaggaaccccgccgcgatcctgaattaaaacgtaaagcctggctggcggtttttcttggttctgcacttttctgggtggttgtcgcactgctgatttggaaagtgtggggataactatggtcggtcaggagcaactggagtcgtcaccattatgccagcatagtgacaatgaaacagaaacgaaacgggaatgttccgtcgttattccagacgactggcaactaacatcgcagcagcaagcctttatagaactgtttgctgaagatgatcagccgaaacaataattatcatcattcttattacccatttttaatgaattaaagggcttttaatacaccgcagcaataacagcttgagttatctcaacacaaaataataaccgttaagggtgtagcctatgatcaacacaaatatgaaatattggtcctggatgggcgcgttttctctgtcgatgctcttctgggccgaactcctctggatcattactcactgatccttgaccccgctgcggcggggttgtcatttgctttgccacaaggtttctcctcttttatcaatttgggttgttatcaaatcgttacgcgatgtttgtgttatctttaatattcaccctgaagagaatcagggcttcgcaaccctgtcattaaggaggagctatgagcagtaccctacgagaagccagtaaggacacgttgcaggccaaagataaaacttaccactactacagcctgccgcttgctgctaaaagtctgggcgatatcacccgtctacccaagagtctcaaagttttgctcgaaaacctgctgcgctggcaggatggtaacagcgttaccgaagaggatatccacgcgctggcaggatggctgaaaaatgcccatgctgaccgtgaaattgcctaccgcccggcaagggtgctgatgcaggactttaccggcgtacctgccgttgttgatctggcggcaatgcgcgaagcggttaaacgcctcggcggcgatactgcaaaggttaacccgctcagtccggtcgacctggtcattgaccacagcgtgaccgtcgatcgttttggtgatgatgaggcatttgaagaaaacgtacgcctggaaatggagcgcaaccacgaacgttatgtgttcctgaaatggggaaagcaagcgttcagtcggtttagcgtcgtgccgccaggcacaggcatttgccatcaggttaacctcgaatatctcggcaaagcagtgtggagtgaattgcaggacggtgaatggattgcttatccggatacactcgttggtactgacagccacaccaccatgatcaacggccttggcgtgctggggtggggcgttggtgggatcgaagcagaagccgcaatgttaggccagccggtttccatgcttatcccggatgtagtgggcttcaaacttaccggaaaattacgtgaaggtattaccgccacagacctggttctcactgttacccaaatgctgcgcaaacatggcgtggtggggaaattcgtcgaattttatggtgatggtctggatagtctaccgttggcggatcgcgccaccattgccaatatgagcccagaatatggtgccacctgtggcttcttcccaatcgatgctgtaaccctcgattacatgcgtttaagcgggcgcagcgaagatcaggtcgagttggtcgaaaaatatgccaaagcgcagggcatgtggcgtaacccgggcgatgaaccaatttttaccagtacgttagaactggatatgaatgacgttgaagcgagcctggcagggcctaaacgcccacaggatcgcgttgcactgcccgatgtaccaaaagcatttgccgccagtaacgaactggaagtgaatgccacgcataaagatcgccagccggtcgattatgttatgaacggacatcagtatcagttacctgatggcgctgtggtcattgctgcgataaccagctgcaccaacacctctaacccaagtgtgctgatggccgcaggcttgctggcgaaaaaagccgtaactctgggcctcaagcggcaaccatgggtcaaagcgagcctggcaccgggtagcaaagtcgtttctgattatctggcaaaagcgaaactgacaccgtatctcgacgaactggggtttaaccttgtgggatacggttgtaccacctgtattggtaactctgggccgctgcccgatcctatcgaaacggcaatcaaaaaaagcgatttaaccgtcggtgcggtgctgtccggcaaccgtaactttgaaggccgtatccatccgctggttaaaactaactggctggccagcccgccgctggtggttgcctatgcgctggcgggaaatatgaatatcaacctggcttctgagcctatcggccatgatcgcaaaggcgatccggtttatctgaaagatatctggccaagcgcacaagaaattgcccgtgcggtagaacaagtctccacagaaatgttccgcaaagagtacgcagaagtttttgaaggcacagcagagtggaagggaattaacgtcacacgatccgatacctacggttggcaggaggacagtacctatattcgcttaagccctttctttgatgaaatgcaggcaacaccagcaccagtggaagatattcacggtgcgcggatcctcgcaatgctgggggatagtgtcaccactgaccatatctctccggcgggcagtattaagcccgacagcccagcgggtcgatatctacaaggtcggggtgttgagcgaaaagactttaactcctacggtagccggcgtggtaaccatgaagtgatgatgcgcggcaccttcgccaatattcgcatccgtaatgaaatggtgcctggcgttgaagggggggtgacgcggcatttacctgacagcgacgtagtctctatttatgatgctgcgatgcgctataagcaggagcaaacgccgctggcggtgattgccgggaaagagtatggaagtggctccagtcgtgactgggcggcaaaaggtccgcgtctgcttggtattcgtgtggtgattgccgaaagctttgaacgaattcaccgtagcaatttaattggcatgggcatcctgccgctggaatttccgcaaggcgtaacgcgtaaaacgttagggctaaccggggaagagaagattgatattggcgatctgcaaaacctacaacccggcgcgacggttccggtgacgcttacgcgcgcggatggtagccaggaagtcgtaccctgccgttgtcgtatcgacaccgcgacggagttgacctactaccagaacgacggcattttgcattatgtcattcgtaatatgttgaagtaacaactatttgcttgccggttattttgcttccggcaagcaaatgaattacacaatgcaagagggttatttgttcagcaaatggcccattttctcggctttggtatcgagataatgttcgttattggggttacgacctacaatcaatggtacgcgttcaacaatattaatccctgcttcggtcagaatttcgacttttttcgggttattggttaacaagcggacttcattgacgccaaggagtttgaacatatcagcgcaaagagtgaagtcgcgctcatcagcggcgaagcctaactggtggttagcctctacggtatcgtaaccttgatcctgcagtgcgtaagcgcggattttattcagcagaccaatgttacgaccttcctgacggtgatacagcaaaataccacggccttcctcggcaatttgcgtcaatgccgcttcgagctggaagccacaatcgcagcgcaagctgaacagggcgtcaccggtcagacattcggaatggacgcgcgcaagtaccggggtatgcccggaaatatcgccatagactagcgcgacatgatcgtgtccggttgccagttcttcaaatcccaccatcaggaaatcgccccatggggttggcagtttggcttctgccacacgtttaagctgcatgaaattctccagataatgctggttctgtattggcttattttgccataacgagaaggggttcacctaatcacgacgcgtcgatcgttcacggaatggcacaaatctgtcaatttttcctggaactggcgttttcagttatgattgtgggacttatcaaaaaggagaggccatgcgtagcattgccagacgtaccgcagtgggagctgcactattgcttgtcatgccagtagccgtatggatttctggctggcgttggcaacctggagaacaaagttggctactaaaagcggctttttgggttactgaaactgtcacccagccctggggcgtcattacacatttgattttattcggctggtttctctggtgtctgcgttttcgcattaaggctgcctttgtattatttgccattctggcggccgcaatccttgtgggacaaggcgttaaatcctggatcaaagacaaagtccaggaaccacgaccttttgttatctggctggaaaaaacacatcatattccggttgatgagttctacactttaaagcgagcagaacgcggaaatctagtgaaagaacagttggctgaagagaaaaatatcccacaatatttgcgtagtcactggcagaaagagacggggtttgcctttccttccggtcacacgatgtttgctgccagttgggcactgctggccgttggtttgctgtggccgcgtcggcgaacgttaaccattgctatcttgctggtctgggcaacgggagtcatgggaagccgcctgctgctcgggatgcattggccacgcgatctggtagtagctacgttgattagctgggcgctggtggcggtggcaacgtggcttgcgcaacgaatttgtgggccattaacaccacctgcggaagaaaatcgcgaaatagcgcaacgagaacaagaaagttaacgctggttgattttccgaatttagcccttaaatcatcaacaatgcgtgtggatgccatttcgcagacggcgcgaaaatggtactttaaagggctattgcggtaagttgaccataatttattcgctctaaccacataacgggaagtaatgtgaaatatttactcattttcttactggtgttagcgatcttcgtgattagcgtcacgttgggtgcgcagaacgatcaacaggtgacgtttaattatctgttagcgcaaggggagtaccgtatttccacattgctggcggtattgtttgctgcggggtttgctatcggttggttgatttgtggcctgttctggctgcgagttcgtgtttccctggcgcgcgctgaacgtaaaataaagcgactggaaaaccagcttagtcccgcgactgacgtggctgtagtgccgcacagcagtgcggcgaaggaataactttctatgctggagttgttgtttctgcttttgcctgtagccgctgcctatggctggtatatgggccgcagaagtgcgcaacaaaacaagcaagatgaagccaaccgcttgagccgtgattacgtagcgggggttaacttcctgcttagtaatcaacaggataaagcggtagacctgtttctcgatatgcttaaagaggatacaggcaccgttgaagcccaccttacgctcggaaacctgttccgtagccgtggcgaagttgatcgcgctattcgcatccatcagaccctaatggaaagcgccagcctgacctatgaacagcgtctgttggcgattcaacaactggggcgtgattacatggccgccgggttatatgaccgcgcggaagacatgttcaatcagctgaccgatgaaactgacttccgcattggcgcgctgcaacagttgctacaaatctaccaggctaccagtgagtggcagaaagcaattgatgttgccgaacgcctggtgaagctgggtaaagataaacagcgcgtcgaaattgcccatttctactgtgagttagccctgcagcatatggccagcgacgatctcgatcgtgccatgaccttgctaaaaaaaggggcggcggcagataaaaacagcgcccgcgtatccataatgatgggacgcgtgtttatggcgaaaggagaatacgccaaagccgtcgaaagtctgcaacgcgtgatatcccaggacagagaactggtcagcgaaacgctggaaatgttgcaaacctgctatcagcagttgggtaaaactgccgaatgggcagaattcctgcagcgtgcggtggaagagaacaccggtgccgatgctgaattgatgcttgctgatatcatcgaagcgcgcgacggtagtgaggccgcacaggtctatattacgcgccagcttcagcgtcatccgaccatgcgtgtgttccataagttaatggattaccacttaaatgaagcggaagaagggcgtgccaaagagagcctgatggtgctgcgtgacatggttggcgagaaggtacgtagtaagcctcgttatcgttgccagaaatgtggttttaccgcatacaccctctactggcattgtccgtcttgtcgggcctggagtaccattaaaccgattcgcggtcttgatggcctgtaatttttaaaaaaaatccgactttagttacaacatactaattattaatgttccattgtgctccggcaacgacggcgcagaaaaagcctgccaggggagaaatcgcaactgttaattttttatttccacgggtagaatgctcgccgtttacctgtttcgcgccacttccggtgcccatcatcaagaaggtctggtcatgacgttaactgctagttcttcttcccgcgctgttacgaattctcctgtggttgttgcccttgattatcataatcgtgatgacgcgctggcctttgtcgacaagatcgacccacgcgattgtcgtctgaaggtcggcaaagagatgtttacattgtttgggccacagtttgtgcgcgaacttcaacagcgtggttttgatatctttcttgacctgaaattccacgatatccccaacactgcagcgcacgctgtcgctgctgcagctgacttaggcgtgtggatggtgaatgttcatgcctctggtggggcgcgtatgatgaccgcagcgcgtgaggcactggttccgtttggcaaagatgcaccgcttttgattgctgtgacagtgttgaccagcatggaagccagcgacctggtcgatcttggcatgacactgagtcctgcagattatgcagaacgtctggcggcactgacgcaaaaatgtggccttgatggtgtggtgtgttctgctcaggaagctgtgcgctttaaacaggtattcggtcaggagttcaaactggttacgccgggcattcgtccgcaggggagtgaagctggtgaccagcgccgcattatgacgccagaacaggcgttgagcgctggtgttgattatatggtgattggtcgcccggtaacgcaaagcgtagatccagcgcagacgctgaaagcgatcaacgcctctttacagcggagtgcatgatgagtgattccaacagccgtctggtctacagtacggaaaccggacgtattgatgagtccaaagcggcccctgtacgccctaaaggcgacggtgtggtgcgtattcagcgtcagaccagtggacgtaaaggtaagggcgtttgcctgattaccggtgtcgatctcgatgatgccgaactgacaaaacttgcagcggaactgaagaaaaaatgcggctgcggcggagcagttaaagatggagttattgaaatccagggcgataagcgtgatttattaaaaagtctacttgaagcgaaagggatgaaggtaaaactcgcaggcggttaacataaaaagccacggatatatccgtggctttcgaatattttactgtgcgtattattcagttatttcgtactgaacagaatcaagcgtattataattgcgagtcgataatcgacatttatttacgattatttaccgacctggtgaccaataacacctccgacagctgcaccacctaatgtacccaacgtactgccatcggtcagtactgcaccgcctaatgcccctgcacccgcgccgattgcggtgttgcggtcccgtttagaccagttagaacaggcactcagagacattgccaaagtaattgccagaacagccgcggtcatttttttgctcgttacaaacataatactctctcctgaatttatgattcacggaagtaagctctctataactataatagctaagaataagtctggtgaaattattccgtgaaatctgctcgcgcgcagggttatatcacgcaggtgataatgacttcctgttatatcgctgataataattttatatcttgagagtgttaataacaggtaaatagtcttaattatcaaccaggaatcatcttagagcggatgatttgccaaactgcaaatcatccgtagagaagggaaatggttaaatgtcaacgacgtgaatggtgagtttactgtgctcaagatgcatcagatcgctggcgcgtattttgctatcggtaatcacgcgattgaatcgctcaacgggaccgatggagtaactatgtacagcaccaaatttgctgctgtcagtcaggactatcgcttcgcactctttttccagcacggcattgaccacatcggtacgcatcatatcgcgaccggtaaatccagtttcaggttgccagccatcaataccaataaatgctttgctgaaatgcacctgttggatgcactggcgtgtcaaagggccaaccatactttcgctttttttctgatacacgccaccgagcaaaataacttcacaaggcgcgtctttcagcaaatgcgcgatgtagctgctgaccgtgatgatagtgacatttttcttctgctcgcccagagtccgggcgagtagggcattgctgctgccattttcgataaagatggtttcgcccggttgaaccaggctcgcggcaaactcggcgagttcacgcttcagcgtatagttgctcatcatacgggtttcgacgtcatcactatcaaggctaacagcaaagccatgtgcacggcggaggtaactcagtttttcgagtgtgttgagatcctggcgaatggtaacttcagaaactccagtggcttttgccagatcggttacgctaacctgaccctggtcaatgaccatctgtagaatagtttgttgtcgggaattcatcgctgtaattcttataacgttataatacttaataaaaaaatactgacgcgccgggcatcctcaaataggaaaacctgaaggcacgattgttaaatctcccacggtgccttcgggatgtctggcgtagattcagcaacctggcgcaagagttctgctttaagtatctcgagattatggatcgcagagtggtaatcgcctgccacaaggatatctaacacaatatcaatacgttcggcaacgcgctgggcatcaaattcagacatcaaggacatccttatagcaaaagggggaaaatgaataatgcaaaaattgccgctaaaagagaagtgtttaacagcaacggctaattatcatccaggaatacgatatataatgacgggatatagcgctaagtatatatattcatctacttatgcgcgcttcagatagcgtttataccagcgttcgaaggcgacggcgggcatcggtttggcaaacaaaaatccttgccgctcattgatcccgttcttggttaaaaaagcatcttcctttgcactctctacaccttcggcgatcacctgaagattcaatgcctgggccacagcgacgatcgcccggaccagactctggctgacaggttgtttgtgaatatctcgaacaaaaacctggtcaagtttgatggcatcgatcggaaagcgcgccagttggctaagactagagtagccggtaccaaaatcatccagatgcacttgcgcacctagttggctaaattgttgaataacagacagtgccagttcatcattctcaatcagacaactctctgtcagttcaacatctatagggcagtattcaaaattgagttcctggagaacctgtttcagggcggtgaaaatggtttgatcggcgagctgacgtgcagaaatatttaccgccactcgcaggtttatgcctttatcccgccactttgccacctggcgtacgacatcgagaatcacccaacggcctaaaggcacaattagcccactctcttcggcgtaggaaatgaagtccaacggtggaatcaacccacgttcaggactctgccaacgtactagtgcttccagactgcgcacttcgccacgccaggtgattttcggttgatagtgaataaccaactgatcgttttccagtgctttacgcaagttggtatccagccagagatattcaaatacccgttgattcatttctggggtaaaaacgcaaaattgtcctcgtccgccttccttcgctgtgtacattgctgtgtcggcgtgacgaataatagccgtgctgtcactaccatgttcgggagagagtgcaatacctacactacagctggtataaacttcaattaaaccaatgcgaaaggggagccgtaagcgggtcaaaattcgacttgccattgcttccagcgcgctttgactggtgttggatgccagtaccagaaactcatccccacctggacgagccaacacctggtcatgttcgagacagcttaaaatagccaaactcacgtcgcgtaataactggtcaccaaacaaatgcccataggcgtcgttgacctttttgaaattatccaaatcaagatacacaaccccaactttattgttatctgcatgattaatagcgtgatcgattaaatcctgcattgcgttacgattcggcagtccggtgatactgtcggtatttgccagaatacgcagtcgctcctgagcgcggcgctcttcggtaatgtcggtgccggaacagattaaaaaaatctcgtttttgccactgccgctgtggacaaatttattgcgaaacagaaacagccgctggcctttacatgttggtatccacagttcgacttcatatgcattgccgcttcgaaaaaatacacggttattgcgcctggatgccgcagcttcacgacggctcataaacagtttaaacacgctttgcccaatgacgtcgtgttctttcaaccctgtgtaatcttcacataaccgattgaagcgttggatattcccccggctgtcgagaatcactattgcggaatatgcttcagaaactacctgctcagcaaaggaaagcccgtgacttaaatcacgagcaaccgccggtgtgtcatgccatgcagacgcgttgccagcccattcccgtttattgatttttcgtcctaccagatgcacagaaagatcgctttcatcgacggtcagactcatcatcaggctggaggtgatggccgtcatttccctgatgcgagcagcctgttcggcagataactgcaatgtacgatcaggttctgtggtttcggtggtagaaaagcgcaaaacatcgctgctttccgtcaaccgccagtatggattgtggcttccgagaaagttgtacaacgttgtggactccctaacggttttcatgatgcatatcctccggttaacagcggagtccgcggttaaataaaaggaacaacatgacttacatgaaattaacggcggctaaacgcattgttttttttatatatttatttgtaatccagttttggaaaaacgccagttttcaaacgaaagtcagttaaaaaatctgcctggatataacgaaggtagagcggggaaataaacggcccatccatgaggaatgggccgtgaaaggagattacgcgaccgggcgcgcaataatgctgcgggtttccatgcggacttcggcaatagtgacgtcaataacgtcagtcactttgtaaaccgtttcacctttaatttgtacagtgccgttttcctggctgcaaaccagttcatcgcgcacagcgtgtaagaaaggtgccggaataaaggcgatagcgccgttatcaaccaaacgaacacgcatgccgccacggctgatatcgacaatttccgctgcgaaacgggtgtcggtcccggctttgtctttcaggaagcgtgcgtataaccagtcaccaacatcacgttctgccatccggttgagacggcgacgctcggccatttggacagtgatttcatcctgtgggcgcgtcgcagtttcgcctttgataaccgctttcagcagacggtggttgatcatgtcgccatatttacggatcgggctagtccaggtggcgtatgcttccagaccgaggccaaagtgaggaccgggttcagtgctaatttcagcaaaactctggaagcgacgaatgcggctgtcgaggaaaccagttggttgcgcgtccagttcacgacgcagtttgcagaaaccgtccagcgtgagcacttcttcggcatcgacatgcagaccgtgcgttttcagcaacgctgccagcgcgtcggcattcgccggatcaaagcccatatgcacgttatagatgccaaaaccgagcttatcgcgcagtacgcgggccgcacaaatgttagcggcaatcatcgcttcttcgacgatacggttggcaatgcgacgaggctcggcgacgatatccagcacttcacctttttcaccgagaataaagcggtaatccgggcgatctttaaacaccagtgcgtggttatgacgccactcgccgcggcgttggcaaatttgcgctagcaaacggacttgttcggcaattgcttcactttcaggctgccagtcaccggtattttccagccagtcagaaacctggtcatacaccagctttgctttggattcgatggtggcggcaaagaattcgatattatcttcaatggtgccatcagcggagagcgtcatgcggcatgccagtaccgggcggacttcattggcgcgcagactgcagagatcgtcagaaagctcgcgaggcagcatagggatgttgaagccaggcagatagttggtgaatgcgcgaattttcgcggctttgtccagcttgctgccttcagcaatccacgcggttggatcggcaatcgccacaatcagctgaagtttgtcatccggcaacgccttagcgaaaagggcgtcatccatatcttctgtgctggcactgtcgatggtgacaaaatccagcgcggtcagatcttcacgaaccagaccttcatcgagcatttcggtagcgacgccgtctggtgcttctttttccagattatggcgtgcaagggtaacccaccacggtacaaagtgatcgtcaccaaaagtgatgtattgtgtcagttctgcatagaaagaacgatcgcctttcagcggatgacggcgcatttcggcaaccgcccagtcgccttctttaaactcgtggttcaggccacgggctgcgcggcaaggaatggcgtcttttaagagtggatgatcaggaacgatggccagacggtcatttttgccctgaaccttacccacgaaacgagtcaggaacggttcaaccagttcttctggctctgcggattcacgttctttttcactgtggatcaccgcgataattcggtcgccatgcatgacttttttcatctgcggcggcggaatgaaataacttttttgcgcgtcgacttccaggaagccaaagcctttttctgtggcttttaccaccccttcagcgcgtggcgtctgggaatgcagttgctgtttaagctgcgctagcagcgggttgtcctgaaacataattgtctattttggtggccattagagcggctgacagttttacgcgaatctgtctgacgcggcaaggttaatatgtctcacccaacgcgatttttaagcgatttatccagccacacagcccgctccataccagcagattaataatctgcgtactacttttttcgtgttcgagtaaagggctgaactgggcggcgctaaagcgatcgggtgctcgggtcagccattgtatcgcctgaacggtagcgcgctcaacagaatgacggtcagcccattggttaatttcattttcgcccttgcgcataagggtgctgatttttttatattcattactactatccatacaggtggcaaaacaagcaggactgccatttatacgcgcgcataacaacgccgcaagctgattatccggctgtgtattgccccgtgtgctgtttaacaacttttcgagaagggaaagactaatagggtggagagagagtatttcggccagttggcaaagttctgcagtactactttttgtgtgctcttcaggtagtttttccacctcatagctgcttcgccagcgtaaactttcatcagcaaacagactcgcgtcggcgtagttttgtatctccagcccgggtaaccagcgtaccggatgcccgagataagcctgaaatgtcgcaattgtccgcgcctgaaagccaataaaaccaatgatttggctaatgatcacacagtcccaggcagtaagaccgacgtcattcagatgctggcggcttcggttgtcgataatagaagggctgctagccagttggcgggcatattgcgtgatttgtgccaaccgatgattactttccctggtggaatcaggcccggggagcggcgtaagtcgcgcgctatagtagttacataaccgctggacgccgcaaacctgagcaaccgtcagggccgtgctcaagcgttcataagcggtgaaggtctgactacgggtcacggtaagctggtcagggaacaaatccactgcaagaacacgcgcagggtccagccaactaaggaagggggccagcgtttctttttcaaggatcacgtcgagtagaaagggatcgctgacctttgcggcttccgggaccagaggcagaacgtcatactccgtagtactggattgcgtttcatgataccagtggcttttgccggtgatgtggcgttgttccatgggcgctccttggtcgtaaaggaaatcgttatcctgacgcaaggcgggaaggggagaaagacggatcggcgataacaaatatcagaaaggtataacagagataacgggcggcagaacgccgcccatctttaccaacagaacgattatttcagttcgagttcgttcattgcagcaatgctgaaaccgccgtcaacgtggaccacttcaccggagataccggcagagagatcggagcacaggaatgccgcagagttacccacatcttcaatagtaacggtacggcgaatcggggtaacggcttcgcaatgagccagcattttgcggaagtctttgataccggaggccgccagagtacggatcggaccagcagagatggcgttaacacgcacaccttccggacccatcgcgttcgccatatagcgcacgttcgcttccagagacgcttttgccagacccataacgttgtagttcgggatagcgcgctcagcgccaaggtaggaaagggtcagcagggcagaacccggattcagcatggagcggcaagcttttgccattgcaacgaagctgtaggagctgatgtcgtgggcaattttgaagccttcacgggtaacggcgttaacatagtcaccatccagctgatcgccaggtgcaaaaccaatagagtgtacgaaaccgtcaaatttcggccaaactttccccagttcagcgaacatggtgtcgatgctggcatcttctgcaacatcgcactgcagaacgatgtcagaacccaattgagcggcaaattcttctacgcggcctttcagtttgtcgttctggtaggtgaatgccagttcagctccttcgcggtgcatcgcctgagcgataccgtaggcgatggatagtttgctggcaacaccggttaccagaatgcgcttaccggaaagaaaacccatagctttaatccttattgttgatgcttgttgtgcctgaaaatcaggcgattcgtcgttttagtaaacagtacgaacagataaacggttattataatcaacctggctgtgagtagctatagttgccaggtccgaccggagcaggctgcggcagggggggcgcttttcccctcaccctaaccctctccccagaggggcgaggggaccgtattgtgcaaatattgttaccccagcaacaaacaggctcatacagcccctaaccctttcatggcgatggctgggacggttcagaccttgccgaatattctccagcaccgtctccatgttttcaccacaacagctattcggctcggtctgccccctcgctctttcagggagagggactccggcggttcagttcctgcagaatattctccagcaccgtctcctcattacaatcaatctcgttattccagaaacgcagcacggtccagccctggctctcaagccagctagtgcgcctggaatcataggcaactgctaaatcatgctgcccaccatccagctcaacgactacacgcgcgctgcagcaagcaaaatcgagaatgtagctccccactggatgttgacggcgaaatttgaaatcactaaaacgtcggctgcgaagatatcgccagagctttcgttcctgcaaagtgagattgcgtcttaaatcacgcgcattacttttaattttatctatcacctcattctgacaagatttaatcttttgtcagaatgaggtgaataatctggaaggaggattcagaaaattagcgatctttacgccacgcatccgccgtcaatgcctcgccaaaatgaccggcaatcagccgtttggtgagttcatgcagcgggcttgccagcacatccgcggtgctgcctcgctcgacaacctcgccctgatgcatcaccagcacctggtcgctaatgtgcttcatcattccgatatgctgggtaacataaatatagctaatgccctgtttttcctgtaattccagcatcagattaatcaactggctacgcatgctcatatccagactagcgagggcttcatcggcaataatgacttttgggcgcaatatcagcgcgcgcgccagacccagacgctgtttttgtccgggtgccaacatatgcggatagtaactgacgtgatccggtagcagcccaaccatacgcatcgtttcaataatctgtttgcgacgctgttccggttccaggtcggtgttcaggcgcagtggaaaatccagaatttggctgatacgttgacggggattcaagctggtgctaggatcctgaaaaatcatgcgaatacgctgactgcggaaggaataatcgccaaaatgcagtggatgatcgtcaatcaataactcgccgctggtaggctctatcattcccgccagcatttttgccagcgtggatttaccgctaccattctcgccaataatcgccagtgtctggccttcacgtagcgtaaagctcaagggttttaccgcttctacggtctgacgacgaaaccagccggtccggtagcggaacgttttacttaaattacgcacttcaagcagcgtttcgatcatctcactctttctccatgttcagcgggaaatgacaggcatagagatgatttttcgcccccgtcaaacgtggcgtcacaatgcattctcgttgtgcatacgggcaacgtggccccagacgacaaccaatcggtaactgttccagcagtgggatagcgccgggcagcgtattgaggcgacttttatgcggcatcgcgctgccgaagtctggtatcgcgcggatcagcgcctgggtataaggatgatgtggcatcgtcaccaactccttactcggcgcggtttccactgtttgaccgcagtaaagcacgttaattttatccgcccattggctaagcatttgtaagtcatggctgataagcaaaatagtggtattgctgttttggttgagacgcgtcagcaggcgaaagatttgcgcctgggttgttggctccatactgttggtcggttcgtcagcaatcagcagacgcggttgattcgccagtgcaatggctatcatcactttctgacattcaccttcggtcaactcatagggaaaactgcgcatcgcatctttgtgatctttaatccccacgcggtgcagcagttcaatggcacggcgtttgcgccagccaaaacgctgccaccaacggcctttataggtccaggctgggatgttttgcatcaactggcggcccacacgttcactagggtcaagacagctctgcggttcctggaaaatcatgctcacgttatggccaaccagtttgcgccgttcgcgtgcggagagacgcagcaaatcgatatcatcaaaacgcatacggtcagcagtaacacgccagttatctttattcaccccacaaatcgctttcgcaatcaaactcttgccggaaccggattcaccaacaagaccgcggatttcaccttcggttaaggtcatacttacccggtcgacggctttaacccactcatcaccggttttaaattcaatggtcaggttacgaatatcgagtaatggcattattccacccccgcaataatcgcacgacgaacgccatcgccaaggaggttaaccaacaacacgctaatcataattgccgcacctggcagcatgacagtccacggggcgacataaatcagttccagcgcatcaccgagcatcgctccccattcagggctggggagttgtgcgccgagatcgagaaagcccagcgcggcgatatcgagaattgccatgctcagtgcgcgggtgatctcggtgaccagcccggcggtgatgtttggcatcacagcaaaccagagaatattcagcgtacttgcgccatccagacgggcggcgataacgtactctttttccagttcgtcatgcaccatgctgtaaatgctacgtaccatacgcggcagcaatgccagccagacagcaaacatagcgtgggacaaactcggtccggcaaacgctacaacgataattgccaacagcaggctagggatcgccagtaaggtatccagaatatggttaagcaccgcactgcggaggccgtgtgtcgccccggcgaaggtgcccagtaccaggccacagatcgtcgcggcaagcgtcaccacaaatgcgccacccacggttggcgcagctccgctcagtaaacggcttaaaacatcgcgtccgaggtcgtcagtccccaggaagaaagaaacttcgccatagcggctccaactcggcggcaataattgataaccgagaaattgctggtcgatgccgtaaggcgcaaaccagccgccaaaaatacacagtacagccagccccgcgcagccgtacaggccgaccatcgcagaggcgtcactataaaatttgcgccaggcggtacgcagcgtgcccggcgggcgcttttcgctgtatacgctatcgtaaggcataccattccttatgtttcagattatttatcgtaaggcataccattccttatgtttcagagggttagccatggcacccaaaatatcagaaatcacgttaacaataatgaccagactgccacacaccatcactccggcggaaatggctgcgtaatcctgctggcggatggcgttaattaaccagcgccctaaacccggccagctaaaaaccatttcggtgatcatcgccagcgtcagcatggtggaaaactgtaagcccaggcgaggaataaccggcggtaacgcgttatgcagaacgtggcgacgcaaaatagtaaagcggctcaaaccgcgggtcgccgccgcttttacatagttctggtcatacacttcgatagtgctgatacgcatcaggcggatcacttcagttgttggcgcaacgctcagggtgatcacgggcaatatcatatggcggattgcgctcatgatcatttcatcccgccatggactgtcgctaagccaggcatcaatcaacgcaaaaccggtaatcggtttcacttcgtagagcagatcgaaacgcccactaacgggcaaccaacctagcgtgagactacaaaacagcgtcaacagaagcgccagccagaacaccgggatactaaagcccagtaaggcgatggcgttgatcaagttatcctgccacttatggcgcgtaatcccggcaatcatccccacggggatgccaacaatcagcgcaaaaccgaaggcgaggatgcacagttccatcgtcgccgggaagacctcttttaactgttcggcaatcggttgaccgttaatgctggaaacaccaaaatcccagtggatcaggccgttaaaccagaacacccaggcattccacagactcgcgccttgtaacggcgcatgaggggtgaaatagctcaagctgaagccaacgaaggtcagcaggaacaaggtgacaatcaataacaaaatgcggcgtaaggtgaagataatcatggttttttcacctcatcctgtttctcgcgatacaccccagcaaaggaggcgttaccaaacgggctaagtaccagacctttgatatcgtaccgataggcctgcaaacgcaaactgctcgccagcggcaaaatgggcaattcctgcgccagaatactctgcgcttcgtcataggcttcaatacgcgccgccagctgctggctagagagcgccttacgcaatacgctgtcgaatttcggatcgcaccagtgggcgaggttggtctggctatgaattgccgcgcagctcagtaacggacggaagaaactgtccgggtcgttactgtccgtcgcccaaccggataacgtcagatcatggctcatatccatcaaccgcgcctcctgaaagcgaccttctaccggcacaatcaccacttttacgccaacctgcgccatatccgcctgaatcagttcggcagttttcagtggactggggttccacgcctggctacgtgtgggcacccacagtttcagcgttaaattttccagccccaagctcttcaactgttcgcggcttttcgccggattgtattcagtaattttagcctcgttgtcataggcccagctggcgcgcggtaaaatagaggccgccgtttcagccgtaccataatagatggattgcatcaggcgctggttattaatcgccagtgccagcgcatggcggacagcgggattatttagcggcggtttggcggtgttaaatgccagataggcgacgttcatcccaggacgcagcgttaaacgcaagcgcgggtcgtcacgcaaaatggatagctggctggcagcaggccaggccagaacgtcgcattccccggtcaggagtttgctcagacgtccggtgccgccggagcctaaatccaccactacctgcggcattaacggtttaccgcgccagaagtcatcatgacgttgtaggcgaataaattgcccggcgcggtattcgctcaactgatacggaccggtgccgaccggttgacggtcgagttgctcctggcgatcttctttctctaacttccgggcatattctgcgctcatgacgctagcataatgggttgcgaggtgccacaaaaaagaagcatccggctgggcgagtcggaactcaacggtatgattatccagtttgcggacgcttttcacgttatcggcaaattgcaggctgtcgaagtaggggaagttgctgccgttgacgttatgccacgggttgttgcggtcaaaaattcgctggaaggtaaacaccacatcgtcggcattcattttacgagtgggagtaaaccagtcggttttttgaaacggaacatcgcgacgcaggtggaagcgataggtcgcgccgttgtcgagtacttcccagctttcggcaagttccggcatcaggcgataggtatagggatcgacatccagcagtcgatcataaaactgggcggcaagggtatcgacaattaacccactgctcgctttggatgggttaaaggtgttgacttgcccgctgacgcaatagacaaaaccgctgtcgcggatatcagcatgcgggggagattcaggcgcggcgattgcctgaccactcacaagtccagcaatcaccaaaagagagcttaatacctggcgcataatattaagggattttatgtaaagaggctatcttactaatatttaatgacatttgccattaccgtttgtgttcaggggtcgtaatgagggccgtgtggttggtcgttgaacaggtgacgtcgccatctgttcaacattcgtacccgtgatttctctataactataactcacagaacaacttagcgaggagcagagcggtacgatcgtgagaaacccattaaagcacgctgcagtgcgtgtcattgttagccagatgcggcgtgaacgctttatccggacaacgatactgaccgatcgtctgcaattaaatcattactcattaccccattgattcaaaaactctgcgatctcatcaatgcgtacgggattaatccccgcttcagcagccatttcatgttgggcttcttcgctgatctcttcattgttcatcaaacgggtgagcagtaactggaagtagtgggccagcggtgtgcgttcagcctctgcgacaggctctgcgcattcggtcgcgtactcatcggcaatatcaaaatattttagcgggatatcgtggttcattatttgcccctggggttaatgcgctaagcataagggcggatgatagcactcgtgatccgggtcatacatctttttatagttaatggcgcggcgcgttaccctcaggcaggataatgcgccgcgcatccgactattacgtttcactcaccggcgttctgtcaccatcatacaacggcactttgcgatagcggcggatcagataccataaatatgcgccgcctaagctagcccataccagaccgagtgtcagactcgtactctcgaggttaacccacagcacacccaccgtcagcgcgccaaccagcggcatcagcaaatagtggaagtgatccttccagcttttattcattcctttacgccgccagaaatgattaaacacgctcagattcacgaaggtaaacgccaccagagcaccgaagttaattaacgctgtggcggtaactaaatcgaagaacagcgcgctcaacgcgacaatcccgaccataatgacgttgagtgccggagtccgccattttgggtgcacatagccaaacacgcgctccggaaacacattgtcacgccccatcacatacagcagacggctcacgctggcatgactagccaggccagaggctaacgtgttcacaaacgtggtgcagaggaaaatgctctggaagagcttgccgccgacgtacagcgcaatttcaggcagtgcggcatccggatctttaaagcggctgatatcgggaaagaacagctgcataaagaagctcgccgcgataaagataacgccaccgtagaccgccgtcaggaagatggctttcgggatcacgcgtgcggcgtccggcgtctcttcgctaagcgtggtcaccgcatcgaaaccgaggaaggagaaacagacaatcgtcgccccggtaataatcgggatcaggtgcgcgttctcgctgataaacggctgaagactccagacggtgccaacgccttctcctttatgcagtccctgaactaccaggaagataaacaccaccatgatggagatttgcaccagtacaaacagggtattgaagttagcgaccaggttgacgctcttcagattcgcggcggttaaaatggcgacgaaggttaccacccacacccacggcggcacttccgggaagagggcggagagatagattttcgccaacaagacgttaatcatcggcaaaaagagataatccagcaggctactccagccgaccataaatccgacgtgcgggttaatgctcttttgcgcgtaggtataggcgctaccggcctccggaaactggcgaaccagtttgccgtagctgatagcggtaaacagcacacccgccagcgccagcaaataggacgccggaacgtgaccgtcgctaatgccggagacaataccaaaagtatcaaatacggtcatcggcgtgagataggccagacccatcatcaccacctgccacaatttcagactttttcgcagacgggttttgccgggttgcgcagcaatattcagtggactattaatagccataattgctgcctcccctgcgtaataaggtttgcggtcgtgtcgacctgaaatcaaacctgtttagcaagggaagcaaagggggcggagtccagtcagtagcaggaggggcgcatacgcagcctccctcgccatgcggggatttaatcatcggcatcatctcatttcctcgtcacagtcttaatcgttaacggaagcccgttgccgcccgcgctccataacgcgacatccgggaaatgtctggattaccagcaaatgtcaggcctggctccgctcaggccgatgaaacaaccccgcaaggggtattacgcgtttttcaacatccactcaatttctgtttctgtgatgaggcgctcaaactgcaacagctcatcatttttacaggcgtgatagacatggcagaagcgttcgcctaaatagcggcgcaggtgatcattctcgataaactcacccagggcatcgctctggcgaatcggaaagggtaagccttcctgttccagcccgttgccttcgacttcttcctgcaacggcagctcgttatcaaggccatgcaaaataccggcaaaaatcgctgccatcaccagatatgggttggcatcggcacccgccacgcgatattccacgcggtgattatgacggtcgccgcacggaatacgcagggcgacggtgcggttgttatggccccagctcgcctgcgtcggcacatacattcccggctggaagcggcgatagctgttcacgtttggtgccagcaacgccatgctgctcggcatcaggtcaatcatcccggcgagcatctttttcagcagcgggctatcttcgccttccgcgtcagaaagcacgttctcgccacgattattttgcatactgatatggatatgcattccgctgcccgcgtgctcttcatacggcttcgccataaaagtggcgtgcatcttatgcttttctgccatcagacgcaccaggcgttttagtgccagcgcatcatcgcaggcttccagcacgttatcagtatggtaaaggttgatttcaaactgacccgggctggcctcagcgaccgcgccatctgccggaatcagctgtaactgcgccagttcatcaatatcattgagcacgtcggcgaagtggttgaggttatcaacggagtaaacctggctttgtgtattgcggtcatcggtgccaggcgcgcagggcggttgcagatacccttcagcgtcgcgctggcgatccagtaaatagaactccagctctaccgctacgaccgggaacaatccgcgctggcgcagctgctgccacaggcggttaagaacgttccgcggctcaacgtcaaagggagcgccatcttcatcgaccatggtcaggagcatctgaccgataaactctggatcggcggcagaaggagttaaggaaccgagaacaggaacacaggtacgatccggctcgcccatttcctgacccagacctgcttcttctactacgttgcccagaatatccattgcaaatacgctggccgggaaataacaccctttctcgagcttcttcaggctactaacaggaatacgctttccacggaagcaaccatttaaatcggtaagtaaaacatcaacatattgcgtattcgggtagcgctccaggtagcgtttcacttcctgcgtaaaggcgctaccccgcctctcttcactctgctgaacaaagttctctacttcaacgatattggtttccatgattcttcgcctttggtttgttttccgctcgttatcaaagcgtaaaatataatgaccaccattcgaatctgtatgcaaactaaatgtttgtcaaatgttaaattgagtttgcaaaaatgaaaacccactgctagattgaaaaaatattgaacataaaggtcatttaaagcgcagtaatggcgataatttagtccactttgtgagattgagcatggaaaatataatgaacaatccggttatcggtgtcgtaatgtgcaggaacaggcttaagggtcatgcgacccagactctgcaagaaaagtacctgaatgccatcatccatgcaggcggcttgcctattgcgctaccacatgcgctggcggaaccgagtttacttgaacaacttttgccgaaactcgatggcatttatcttcctggtagtcccagcaatgtgcagccgcacctatatggtgaaaacggcgatgagcctgacgccgatcccgggcgtgatcttctgagcatggcgataattaatgccgcactcgaaaggcgcatccccattttcgccatctgccggggtttacaagaactggtggtggcaaccggtggtagcttgcatcgcaagctgtgcgaacagcctgaattgctggaacatcgggaagatcccgaactgccggtggaacagcaatatgcaccgagccatgaagttcaggttgaagaggggggattactgtctgcgttgttacctgaatgtagcaacttttgggtaaactctctacatggacaaggggcgaaggtcgttagcccacggttgcgtgttgaagctcgcagcccggatggcttagttgaggcggttagcgtcatcaatcatccttttgcgctgggcgtacagtggcacccggaatggaacagtagcgagtacgcgcttagccgtatattgttcgagggctttatcaccgcttgtcagcaccatatcgctgaaaaacagcgactctgaccactacagtttaaggaaatgcaaatatgagtgatgagggactggcgccaggaaaacgcttgagcgaaatccgccagcagcaggggcttagtcaacgtcgtgccgccgaactctccgggctgactcacagtgctatcagtacgatagaacaagataaagtcagccctgccatcagtacgctgcaaaagctgctgaaggtgtatggtctgagtctcagcgaattcttttccgagccggaaaaacctgatgagccgcaggtcgtcattaatcaggacgacttaattgagatgggtagtcagggtgtgagtatgaagctggttcataacggtaacccgaatcgcacgctggcgatgatctttgaaacgtaccagccgggcacaaccactggggaaagaattaagcatcagggtgaggaaataggcactgtactggaaggtgaaattgttctgacgattaatggtcaggattaccacctcgtcgcggggcaaagttatgccattaataccggcatcccgcacagtttcagtaatacgagcgcaggtatttgccgaattatcagcgcccatacgcccaccacgttttaatctttttgttctgtaagccgggtaagcgcaatgcgcccggcaatctatacacaaaatcattcaagttgcatcaaggcggcaagtgagcgaatcccgatgagcttactcaggtaagtgattcgggggagcgaacgcagccaaggcagaggcggcttgaaggatgaagtgtatataaagaatgtcgccagaaataaacgggcatacggcccggggatctctgcgccctgacgttcacaaactgcatatatctgatagacgtgaaacaggagtcataatgaattttcatcatctggcttactggcaggataaagcgttaagtctcgccattgaaaaccgcttatttattaacggtgaatatactgctgcggcggaaaatgaaacctttgaaaccgttgatccggtcacccaggcaccgctggcgaaaattgcccgcggcaagagcgtcgatatcgaccgtgcgatgagcgcagcacgcggcgtatttgaacgcggcgactggagtctctcttctccggctaaacgtaaagcggtactgaataaactcgccgatttaatggaagcccacgccgaagagctggcactgctggaaactctcgacaccggcaaaccgattcgtcacagtctgcgtgatgatattcccggcgcggcgcgcgccattcgctggtacgccgaagcgatcgacaaagtgtatggcgaagtggcgaccaccagtagccatgagctggcgatgatcgtgcgtgaaccggtcggcgtgattgccgccatcgtgccgtggaacttcccgctgttgctgacttgctggaaactcggcccggcgctggcggcgggaaacagcgtgattctaaaaccgtctgaaaaaagtccgctcagtgcgattcgtctcgcggggctggcgaaagaagcaggcttgccggatggtgtgttgaacgtggtgacgggttttggtcatgaagccgggcaggcgctgagccgtcataacgatatcgacgccattgcctttaccggtagtacccgtaccgggaaacagctgctgaaagatgcgggcgacagcaacatgaaacgcgtctggctggaagcgggcggcaaaagcgccaacatcgttttcgctgactgcccggatttgcaacaggcggcaagcgccaccgcagcaggcattttctacaaccagggacaggtgtgcatcgccggaacgcgcctgttgctggaagagagcatcgccgatgaattcttagccctgttaaaacagcaggcgcaaaactggcagccgggccatccacttgatcccgcaaccaccatgggcaccttaatcgactgcgcccacgccgacagcgtccatagctttattcgggaaggcgaaagcaaagggcaactgttgttggatggccgtaacgccgggctggctgccgccatcggcccgaccatctttgtggatgtggacccgaatgcgtccttaagtcgcgaagagattttcggtccggtgctggtggtcacgcgtttcacaagtgaagaacaggcgctacagcttgccaacgacagccagtacggccttggcgcggcggtatggacgcgcgacctctcccgcgcgcaccgcatgagccgacgcctgaaagccggttccgtcttcgtcaataactacaacgacggcgatatgaccgtgccgtttggcggctataagcagagcggcaacggtcgcgacaaatccctgcatgcccttgaaaaattcactgaactgaaaaccatctggataagcctggaggcctgaaatgaccgaacataccagcagttactacgccgccagtgcgaataaatatgcaccattcgacacgctgaatgagagtatcacctgcgacgtttgcgtggttggcggcggctataccgggctctcctccgcgctgcatctggcggaagcgggctttgacgtagtggttctcgaagccagtcgcatcggctttggcgcaagcgggcgcaatggcggacagcttgtgaactcctacagccgcgacatcgacgtgatcgaaaaaagctacggcatggacaccgcccgtatgctcggcagcatgatgttcgaaggtggtgagatcatccgcgaacgtatcaaacgttatcagattgactgcgactaccgccccggcggcctgtttgtggcgatgaatgataaacagctcgccacacttgaagagcagaaagagaactgggaacgctacggcaataaacagctggaattgctggacgccaacgccattcgccgtgaagtagccagcgatcgctataccggtgcgctgctggatcacagcggtgggcatattcatccgctaaaccttgccattggcgaagcggacgccatccgcctcaacggcgggcgcgtgtatgaactttctgccgtgacgcagatccagcacaccacgccagccgttgtgcgaactgccaaaggtcaggtgacggcgaagtatgtgattgtcgccgggaatgcgtatctgggcgataaagtagagccggaactggcgaaacgcagcatgccgtgcggcacgcaggtgatcaccaccgaacggctgagcgaagatttagcccgtagcctgatcccgaaaaactactgtgtggaagactgtaactatctgcttgattactaccgtcttaccgccgacaaccgcctgctgtacggcggcggcgtggtctacggcgcgcgcgacccggatgacgttgagcgccttgtggtgccgaaactgctgaaaaccttcccgcagctgaagggcgtgaaaattgattaccgctggacgggcaacttcctgctgaccctgagccgtatgccgcagtttggtcgcctcgataccaacatctattacatgcagggctacagcggccacggcgtgacctgtactcatctagccggacgtttgattgccgaactgctgcgcggcgacgccgaacgtttcgatgccttcgccaatctgccgcattacccgttccccggcgggcgcacgctgcgtgtgccgtttaccgcgatgggcgcggcgtattacagcctgcgcgatcgtctgggcgtttaattttcgattaaccgtgaagagtcaaaaggtgtgaaacatgagcaacaatgaattccatcagcgtcgtctttctgccactccgcgcggggttggcgtgatgtgtaacttcttcgcccagagcgctgaaaacgccacgctgaaggatgttgagggcaacgagtacatcgatttcgccgcaggcattgcggtgctgaataccggacatcgccaccctgatctggtcgcggcggtggagcagcaactgcaacagtttacccacaccgcgtatcagattgtgccgtatgaaagctacgtcaccctggcggagaaaatcaacgcccttgccccggtgagcgggcaggccaaaaccgcgttcttcaccaccggtgcggaagcggtggaaaacgcggtgaaaattgctcgcgcccataccggacgccctggcgtgattgcgtttagcggcggctttcacggtcgtacgtatatgaccatggcgctgaccggaaaagttgcgccgtacaaaatcggcttcggcccgttccctggtagcgtgtatcacgtaccttatccgagtgatttacacggcattagtacacaggactccctcgacgccatcgaacgcttgtttaaaagtgacatcgaagcgaagcaggtggcggcgattattttcgaaccggtgcagggcgagggcggtttcaacgttgcgccaaaagagctggttgccgctattcgccgcctgtgcgacgagcacggtattgtgatgattgctgatgaagtgcaaagcggctttgcgcgtaccggtaagctgtttgccatggatcattacgccgataagccggatttaatgacgatggcgaaaagcctcgcgggcgggatgccgcttagcggcgtggtcggtaacgcgaatattatggacgcacccgcgccgggcgggcttggcggcacctacgccggtaacccgctggcggtggctgccgcgcacgcggtgctcaacattatcgacaaagaaagtctctgcgaacgcgcgaatcaactgggccagcgtctcaaaaacacgttgattgatgccaaagaaagcgttccggccattgctgcggtacgcggcctggggagcatgattgcggtagagtttaacgatccgcaaacgggcgagccgagtgcggcgattgcacagaaaatccagcaacgcgcgctggcgcaggggctgctcctgctgacctgtggcgcatacggcaacgtgattcgcttcctgtatccgctgaccatcccggatgcgcaattcgatgcggcaatgaaaattttgcaggatgcgctgagcgattaatagcccaacgcaataatgtctgatgcgctgcgcttatcaggcctgcaaacgacgtattgattatgtatgccgaataaagcattcacgccgcatccggcaagttgtattgctcaacttcgttaaatctggtgctttttcaacaacgcgcggaactgatgataagttaaccccagtaattcagccgcgcgcttctggttatatttcccttgttgcaaactgagttgcagcaactctttttcctgctgcatctgaaactcacgtaaatccagcggcagtgttggaaggctggtggtttcactaacggcgatagcgtcttcaggcggacgccgtttaaagggatcaataatgatgtcatcaagcggataatcgctggtgccgtggcgatacacactacgttccaccacgtttttcaattcacgaatatttcccggccaacgataattcagcaatgtttctctggcgcgctccgtaaaccccgggaacagaggcagcttgatttcccgacacatctggatggcaaagtattctgccatcaacattatgtcgctttcgcgctcgcgcagtggtggcagttgtacaacatcaaaagccagtcggtcgagcaggtcagcgcgaaaagtgccttcattgaccatcgccgggagatcggcattcgtcgcgcataccaaccgcacattcacctgcaatggttggctgccgccaacgcgctccagttcaccgtactcaatcacgcgcaataatttctcctgcaccatcatcggtgccgtagcgagttcatcaagaaatagcgtaccgccgtcggcacgttcaaatctccctggatgacgtttttgcgcaccggtaaacgcccccgcttcgtgaccaaacagttcggaatccagcagattttcatttaacgccgcgcagttaagggaaataaacggcccttgccaacgggaggagagataatgcaggcggctggcaatcagctctttaccggtgccgcgttcgccgatgatgagcaccggtttgtccagcggtgcgagatggctaacctgttccagcacttcgagaaagctgttcgcctcaccaagtaaattatctttgtattctgccatgatgaaattcgccacttgttagtgtaattcgctaactcatcctggcatgttgctgttgattcttcaatcagatctttataaatcaaaaagataaaaaattggcacgcaaattgtattaacagttcagcaggacaatcctgaacgcagaaatcaagaggacaacattatgggtattttttctcgctttgccgacatcgtgaatgccaacatcaacgctctgttagagaaagcggaagatccacagaaactggttcgtctgatgatccaggagatggaagatacactggttgaagtacgttctactagcgcgcgcgcgttggcagaaaagaaacagctgactcgccgtattgaacaagcgagcgcgcgtgaggttgaatggcaggaaaaagccgaactggcgctgctgaaagagagagaggatctggcacgtgcagcgttaattgaaaaacagaaactgaccgatctgattaagtccctggaacatgaagtgacgctggtggacgatacgctggcacgcatgaagaaagagattggcgagctggaaaacaaattgagcgaaacacgcgctcgccagcaggcattgatgttacgtcatcaggcggcaaacagcagccgcgatgtgcgtcgtcagctggacagtggcaaactggatgaagcaatggctcgtttcgaatctttcgaacgtcgtattgaccagatggaagcggaagcagaaagccacagcttcggtaaacaaaaaagcctggacgatcagtttgccgaactgaaagccgatgatgcaatcagcgaacaactggcacaattaaaagccaaaatgaagcaagacaatcaataataacatccaggcggcgtccgaacgcgccgccgctcatcgtctaaggagtacttatgagcgcgctatttctggctattccgttaaccatttttgtgctgtttgttttaccgatctggttatggctgcattacagcaatcgttctggtcgcagtgaattgagccaaagtgagcagcagcgattagcgcaactggctgatgaagcaaaacggatgcgcgaacgtattcaggcgctggaatctattcttgatgcagaacatccgaactggagggatcgctaatggcgggcattaatctcaataaaaaattatggcgtattccacagcagggcatggtccgcggcgtctgcgccgggattgccaactattttgatgtaccggtaaaactggtgcgtatcctggtggtgctgagcattttcttcggtctggcgctgtttaccctggttgcttacatcattttgagttttgcgcttgatccaatgccggacaacatggcctttggtgagcagctaccttccagcagcgaattgctggatgaagtcgaccgtgaactggcggcaagtgaaacgcgtttacgcgagatggaacgttatgtcacttccgatactttcacgttacgtagccgtttccgtcaactgtgaggaaagttatgaatactcgctggcaacaggccgggcaaaaggtaaagcctggtttcaaattagcaggcaagctggtacttcttaccgcactgcgctatggcccggcgggtgtggcgggctgggcgataaaaagtgttgctcgccgaccgctgaaaatgttgctggctgtggcgctggaaccgctgttaagtcgggctgctaataaactggcacagcgttataaaaggtgaggggagtttcgcaaaaattgttaaatctcaggcgtataatggatggcaattttcatccatagaaggacgcttacatgtttaaaaaaggcttacttgctctggcactggtgtttagtctgcccgttttcgccgctgaacactggatcgatgttcgtgttccagagcagtatcagcaagagcacgttcagggggccatcaatattcccctgaaggaagtgaaagagcgcattgccaccgccgttccggataaaaacgacaccgtgaaagtgtattgcaatgccggacgccagagtgggcaagcaaaagagatccttagcgagatgggatatacccacgttgagaacgccggtggcctgaaagacatcgcaatgccgaaggtcaaaggttaaaagaattcaccatgagcggcgcttatgcgccgtttttttttctgtcacaccttatttacatccccatagattatttgcgtcagctcacaaatacgctttttccctggtaaaaaatgatttcctgcgtgactaaaacccttgtgctcaattgacagtttattttctgcggagtagtctctcgtttcatgggaccgctaccacggaaaggcaacatgaaacagaaaattacggattacctggacgaaatctacggtggaacatttaccgcaactcatttacagaaacttgtaacgcgtcttgagagtgcgaaacgattaattacacagcgacgtaaaaaacactgggatgaaagtgatgtcgtgttaattacctatgccgatcaatttcacagcaatgatttaaaaccattacccacatttaatcagttttaccatcaatggctgcaaagcatttttagtcatgttcatttgttgccgttttatccatggagttctgatgatggctttagcgtaattgattatcatcaggtcgccagtgaagcgggggagtggcaggatattcagcaactcggtgaatgcagtcatttaatgtttgattttgtctgcaaccatatgagcgcaaaaagtgaatggtttaaaaactatttacaacagcatccaggttttgaagatttttttattgccgttgacccgcaaaccgatctcagcgccgtcactcgcccgcgtgcgttaccgttattaacgccattccagatgcgcgatcatagtacgcgccatttatggaccacctttagtgacgatcaaattgacctgaattaccgtagccctgaagtgttgctggcgatggtggatgttttactctgttaccttgcgaaaggtgctgagtatgtccgcctggatgccgttggctttatgtggaaagagccgggaacaagctgcatccatctggaaaaaacacatctgattatcaaactgttacggagcattattgataacgttgcgccaggtacagtgatcattaccgagaccaatgttccgcataaagacaacattgcttactttggcgcaggcgatgacgaagcacatatggtgtaccagttcagcctgccgccactggtgctgcatgcggtgcaaaaacagaacgttgaggcgctttgtgcgtgggcgcaaaacctgacactaccttccagcaacaccacctggtttaacttcctcgcctctcacgatggcatcgggctaaacccgctacggggcttgttgcctgaaagcgaaatattagagctggtcgaggcgttacagcaggaaggtgcattagtaaactggaaaaataatcccgacggtacacgcagtccgtatgaaataaatgtgacctatatggatgcgttaagccgccgtgagagtagcgatgaagaacgttgcgccaggtttatccttgcccatgcgattttgttaagtttccccggtgtgccagcgatatatattcaaagtattcttggcagccgtaatgattacgcaggtgtcgaaaaactcggatataaccgtgcgattaaccgtaaaaaatatcacagtaaagagataacccgagaactgaacgatgaagctacattaaggcatgcggtatatcatgagttgagccgtttaattacacttcgtcgcagccataacgagtttcatccggataataattttaccattgatacgattaatagttccgtaatgcgtattccaagaagtaacgctgatggtaattgtctgactggattgtttaatgtcagtaaaaatattcagcatgtaaatattactaatctgcatggtcgggatctgattagtgaagttgatatattgggtaatgaaataacgctgcgcccctggcaggttatgtggattaaataaaaaggaacatctcatgattaaaagtaaaatcgtgctgttaagtgcactggttagttgcgccctgattagtggctgtaaagaagaaaataaaacgaatgtatccatcgaatttatgcattctagcgtggagcaggagcgccaggccgttatcagtaaattgattgcccgttttgaaaaagaaaaccctggcatcaccgttaagcaagtgcccgtggaagaagatgcctataacactaaagtcattactcttagtcgtagcggtagcctgccggaagtgatcgaaaccagccatgactacgccaaagtgatggacaaagagcagcttatcgatcgcaaagcggttgccacagtcatcagcaacgttggtgaaggcgcgttttacgatggcgtactgcgtattgtgcgtaccgaagatggtagcgcatggaccggtgttcctgtcagcgcctggattggcggtatctggtatcgcaaagatgtgctggcaaaagcggggcttgaggagccgaaaaactggcaacagctgctggacgttgcacagaaactgaatgacccggcgaataaaaaatacggcattgcgctgcctacagcagaaagcgtgttgacggaacaatccttctcccagtttgcgttatccaaccaggctaacgtctttaacgccgaaggcaaaatcacccttgatacaccagagatgatgcaggcactgacctattaccgcgaccttactgccaacactatgccgggttctaacgacatcatggaagtgaaagacgcctttatgaacggcaccgcgccgatggcgatttactccacctatatccttccggctgtgattaaagaaggcgacccgaaaaacgtcggtttcgtggtgccaaccgagaaaaactctgcggtctacggcatgttgaccagcctgaccattaccgccgggcaaaagaccgaagagacggaagcagcagaaaaatttgtcacctttatggagcaggcagacaacattgccgactgggtgatgatgagcccaggtgctgcgctgccggtgaataaagcggtggtgactaccgccacctggaaagacaacgacgttattaaggcgctgggtgaactaccgaatcagctaatcggtgaactgccaaatattcaggtttttggcgcagtaggggataaaaactttacccgcatgggtgatgtgacgggttctggcgtggtgagtagtatggtgcataacgtcaccgtgggtaaagccgatctctctactacgctgcaagcgagccagaaaaaactggatgaactgatcgaacagcactaaacccaggacaggaatccgcaatgaacaggctttttagtggtcgttccgatatgccctttgcgctgctgcttctcgcgcccagcttattactgctgggcggtctggtggcgtggccgatggtgagcaatatcgaaatcagttttttacgtctgccgctcaatcccaacatcgagagtacgtttgttggggtgagcaactatgtgcgtatcctctccgatcccggcttctggcatagcctgtggatgacggtctggtataccgcgctggtggtggcgggcagcaccgtgctcgggctggcggtggcgatgtttttcaaccgcgagttccgcctgcgcaaaaccgcgcgtagcctggtgatcctctcctacgtaacgccgtccattagcctggtgttcgcctggaaatacatgttcaacaacggctacggcattgttaactacctcggcgtcgatcttctgcatctctatgagcaggcaccgctgtggttcgataatccgggcagtagctttgtgctggtggtgctgttcgccatctggcgctacttcccgtatgcctttatcagctttctggcgattttgcagaccatcgacaaaagcctgtacgaagcggcagagatggatggcgctaatgcctggcaacggtttcgtatcgtcacgctgcccgcaattatgccggtcctggcgacggtggtgacactgcgcaccatctggatgttctacatgttcgcggatgtttatttgctgacgaccaaggtcgatattctcggtgtatatctctacaaaaccgcctttgcctttaatgatttaggaaaagcggcggcgatcagcgtggtgctcttcatcattattttcgctgtcattctgctgaccaggaaacgggtgaacctcaatggcaacaaataaacgcacactcagtcgcatcggtttttactgcgggctggcgctgtttctcatcatcacgctgtttccattttttgtgatgctgatgaccagcttcaagggcgcgaaagaggcgatcagtctgcatcctacgctgctgccgcagcagtggacgctggagcattacgtcgacatttttaacccgatgattttcccgtttgtcgactacttccgtaacagtctggtggtgtctgtggttagttccgtggtggcggtattcctcggcattcttggggcttacgcgctttcccgcctgcgctttaaaggtcggatgaccatcaacgccagcttttacacggtgtatatgttctctggcattttgctggtggtgccgcttttcaaaatcatcaccgcgcttggcatttacgacactgagatggcgctgatcatcaccatggtgacgcaaactctgcccaccgccgtgtttatgctgaaaagctacttcgacaccatccccgatgagatcgaagaagcggcgatgatggatggcctcaaccgtctgcaaattatcttccgcatcaccgtgccgttggcgatgtccgggctgatatccgtgttcgtctactgctttatggtggcgtggaacgactatctgtttgcgagcattttcctctccagcgccagcaatttcaccttaccggtgggcctgaacgcgctgttcagtacgccagattacatctggggacggatgatggcggccagtctggtgaccgcattgccggtggtgattatgtatgcgcttagcgaacgttttattaagagtggtttgaccgccggtggcgtgaagggctaaagcggccagtttctttacaaggagttttaaatgaaaaagttagtagccacagcaccgcgtgttgctgcgctggttgagtatgaagatcgggcgattttagctaatgaagtgaagatccgcgtgcgtttcggcgcaccgaaacacggaacggaagtggtcgacttccgcgccgccagcccgtttattgatgaagactttaacggcgaatggcagatgttcactccgcgtccggcagatgcgccgcgcggcattgagtttggcaaattccagcttggcaacatggtggttggcgacattatcgagtgcggcagcgacgttaccgactacgcggtgggcgacagcgtatgcggctacggcccgctctccgagacggtcatcattaacgcagtgaataactacaagctgcgcaaaatgccgcaaggcagctcctggaaaaacgccgtctgctacgacccggcgcagtttgccatgagcggcgtgcgcgatgccaacgtgcgcgtaggggattttgtggtggtggtagggcttggcgcaatcggtcaaattgccatccaactggctaaacgcgctggcgcttctgtggtgattggcgtcgatcctatcgcccatcgctgtgatattgcccgtcgccacggcgcggatttctgccttaaccccatcggcactgatgtaggtaaagagatcaaaacgctgaccggcaagcagggtgccgatgtgattatcgaaaccagcggctacgccgacgcgctgcaaagcgcgctccgcggtctggcttatggcggcaccatctcctatgtcgcgtttgccaagccgtttgccgaaggttttaacctcggacgcgaagcgcatttcaataacgccaaaattgtcttctctcgcgcgtgcagcgaaccgaacccggattatccgcgctggagccgcaagcgtattgaagaaacctgttgggaactgctgatgaacggttatctcaattgcgaagatttaatcgacccggtggtgacctttgccaatagcccggaaagctatatgcagtatgtcgaccagcatccggaacagagcatcaaaatgggcgttacgttttaattcaaaggaatgaaaaaaatgaaaatcggcacacagaatcaggcgttctttccggaaaacattctggagaaatttcgttatatcaaagagatgggcttcgatggttttgagattgacggcaaactgctggttaacaacatcgaagaagtcaaagcggcgatcaaagaaaccggtttaccggtgaccaccgcctgcggtggctatgacggatggattggcgactttatcgaagagcgtcgtcttaatggcttaaagcagatcgagcgcattctcgaagcgctggcagaagtgggcggtaaaggcatcgtcgttccggctgcgtggggcatgtttaccttccgcttaccgccgatgaccagcccgcgtagcctggacggcgaccgcaaaatggtgagtgattccctgcgcgtactggaacaggtcgccgcgcgtaccggaaccgtggtgtatctcgaaccgttaaaccgctatcaggatcatatgatcaacaccctcgccgatgcccgccgttacatcgtcgaaaacgatcttaaacatgtacagattatcggcgatttctatcacatgaatatcgaagaagataacctggcgcaggcgctgcatgacaaccgcgacctgctcggtcatgtgcatattgcggataaccatcgctaccagccgggcagcggcaccctggatttccacgcgctgtttgaacagctgcgcgcggataactatcagggctatgtagtgtacgaagggcgtatccgggcggaagatcctgcccaggcgtaccgtgatagcttggcctggttgcgtacctgctaagaggtctttgtgaaaagtgcaatgacaagctctccgctgcgggtcgcgataataggcgcaggccaggtggcggataaggttcatgctagctactactgcacccgcaacgatctggaactggtggctgtctgtgacagccgcctttcccaggcgcaggcgctggcagaaaaatacgggaatgcatccgtgtgggacgatccgcaggccatgctgctggcggtgaaacctgatgtggttagcgtctgcagtcctaaccgttttcattacgaacataccctgatggcactggaagcgggctgccatgtgatgtgcgaaaaaccgcccgccatgacgccagaacaggcgcgggaaatgtgcgataccgcgcgcaaactgggcaaggtgctggcctacgactttcaccatcgttttgcgctcgatacgcaacagctgcgtgaacaggtgaccaacggcgttttgggagagatttacgttaccaccgcccgcgccctgcgtcgctgcggcgttcccggctggggtgtctttaccaataaagaactgcagggtggtggcccgctgatcgacatcggcattcatatgctggatgctgcgatgtatgtgctgggctttccggcggtgaaaagcgtgaatgcgcatagctttcaaaagatcggcacgcaaaagagctgtggtcaatttggtgagtgggatccggcaacttacagcgtcgaagatagcctgtttggcaccattgaatttcataacggcggcattctgtggctggaaacgagttttgcactcaacatccgcgaacagagcattatgaacgtcagcttttgtggtgataaagctggtgcgacgctgtttccagcacatatctacaccgataacaacggtgaattaatgacgctgatgcaacgggaaatagcagacgacaaccgccatttgcgcagcatggaagcctttatcaatcacgtacagggcaagcccgtgatgatagccgacgccgagcaggggtacatcatccagcaactggtggcggcgttgtatcaatccgcagaaacagggacgcgtgtggaattatgaccaggccagtaacgttaagtgaaccccatttcagccagcataccctgaacaagtatgcaagcctgatggcgcaggggaacggctatcttgggcttcgcgccagccatgaagaagattacacgcgccagacgcgagggatgtatctggcggggctgtatcatcgggcgggaaaaggtgaaatcaacgaactggtgaacctgcctgatgtcgtggggatggagattgccataaatggtgaggttttcagcttatcccacgaagcctggcagcgtgagcttgactttgccagtggcgaattacgccgcaatgttgtctggcgtaccagcaacggcagtggttacaccatcgccagccgtcgctttgttagcgcagaccaactgccgctcattgcgctggaaatcactattacgccactggacgccgacgcgagtgtgctgattagtacaggcattgacgccacgcaaaccaatcacggtcgccaacatctcgacgaaacccaggtgcgggtgtttggtcagcatctgatgcaggggagctacaccacccaggatggacgcagtgatgtggccatcagctgttgctgtaaggtgagcggtgatgtgcagcaatgctataccgccaaagagcgccgtttactgcaacataccagtgcgcagcttcatgcaggcgagacaatgacgttgcaaaaactggtgtggatcgactggcgggatgacaggcaagctgctttagacgagtggggcagcgcgagccttcgccagcttgaaatgtgcgcgcagcagagttacgaccaacttcttgcagcaagtacagaaaactggcgtcaatggtggcagaaacgtcgtatcacggtaaatggcggcgaagcgcacgatcagcaagcgttagattatgcgctttatcatctgcgcatcatgacgcctgcccacgacgagcgcagcagcattgcggcaaaaggcttaaccggcgaaggctacaaaggccacgttttctgggatacagaagtatttttgttaccgtttcatctgtttagcgatccgacggttgcccgaagtttactgcgttatcgctggcacaacttgccaggcgcgcaggagaaagcgcgacgcaacggctggcagggcgcgctatttccgtgggaaagcgcgcgcagcggcgaagaagagacgccggaatttgccgccattaacattcgcaccgggctgcggcaaaaagtggccagcgcgcaggcggaacatcatctggtggccgatatcgcctgggcggttattcaatactggcagaccacgggggatgaaagtttcattgcgcatgaaggcatggcgctacttctggagacggcaaagttctggattagccgcgcggtgagagttaacgatcgtctggaaattcatgatgttattgggccagacgaatataccgaacatgtcaataataatgcatacaccagctatatggcccgctacaacgttcaacaggcgctgaatattgcccgccagttcggctgtagcgacgatgcgtttatccatcgcgccgaaatgttcctcaaagagctatggatgccagaaattcagcccgacggcgttttgccgcaggatgatagctttatggctaagccggcgattaatctggcgaaatacaaagcggcggcggggaagcaaaccatactgctggattatagtcgcgcagaagtgaacgagatgcagatcctcaaacaagctgatgtggtgatgctcaattacatgctgccggagcagttcagtgcggcaagctgtcttgccaatctgcaattttatgaaccgcgcactattcacgacagcagtttaagtaaagcaatccacggcattgttgccgcacgctgtggcctgctgacccaaagttatcagttctggcgcgaggggactgaaatcgatcttggtgctgatccgcatagttgtgatgatggtatccatgctgccgcaactggcgctatctggctgggggcgattcagggttttgccggggtgagcgtgcgtgacggtgaattgcatctcaatccggcgttacctgagcagtggcaacagttgtctttccctctgttctggcagggctgcgaattacaggtcactcttgacgcgcagcgtattgcgattcgaacttctgcgcccgttagtctgcgtttgaacggtcagcttataaccgtggctgaagaatctgttttctgtttgggtgattttattttgcccttcaatgggaccgctaccaaacatcaggaggatgaatgaaactgcaaggggtaattttcgatctggatggtgtaatcaccgataccgcgcatctgcatttccaggcgtggcagcagattgccgctgaaattggcatcagcattgatgcgcagtttaacgaatccctaaaagggatcagccgcgatgagtctctgcggcgcattctgcaacacggggcaaagagggcgactttaacagccaggagagggcgcaactggcgtatcgcaaaaatctgctctatgtccacagtctacgcgagttgacggtcaacgctgttctacccggcattcgctctttgctggcagatctccgtgcacagcagatcagcgttgggctggcttctgtctccctgaatgcgccgacgattttagcggcgctggagctgcgcgagtttttcaccttctgcgcggatgcttcccaacttaaaaacagcaaaccggacccggaaatctttctcgccgcctgtgcagggctgggcgtgccgccgcaggcatgtatcggcattgaagatgcgcaggcgggcattgacgccattaacgccagcggtatgcgcagcgtggggatcggcgcgggcttaaccggggcgcaattactgttgcctagtacggaaagtctcacctggccgcggttaagcgccttctggcaaaacgtataacaaaggaatcaacatggctcagcttagcttacaacatattcaaaaaatctacgataaccaggtgcatgtggtgaaggacttcaacctggaaattgccgataaagagttcatcgtgtttgtcggcccgagcggctgcggtaagagcaccaccctgcgcatgattgccgggcttgaggagatcagcggcggcgatctgttgatcgacggcaaacgaatgaatgacgttccagccaaagcacgcaatatagcgatggtgttccagaactacgcgttgtatccgcatatgacggtttacgacaacatggcgtttggtctgaagatgcaaaaaatcgccaaagaggtgattgatgagcgggtgaactgggcggcgcaaattctcggcctgcgtgagtacctgaaacgtaagccgggggcgctttccggcgggcaacgtcagcgagtggcgcttgggcgggcgattgtacgcgaagcgggcgtgtttttaatggatgaaccgctctctaaccttgatgccaagctgcgcgtgcaaatgcgcgcagagatcagcaagctgcatcagaaactgaacaccaccatgatctacgtgacccacgatcagaccgaagcgatgaccatggcgacgcggattgtgattatgaaagacgggattgttcagcaagtaggtgcgccgaaaaccgtttataaccaacccgcgaatatgtttgtttccggatttattggaagtccagcgatgaattttattcgcggcacgatcgatggcgataaattcgttacggaaacgcttaaattaaccattcccgaagagaaattagcggttctgaaaacacaggaaagtttgcataagcccatcgtgatgggaatacgaccggaagatattcatccggacgcgcaagaggaaaataacatttccgccaaaattagcgtggcagaattaaccggtgcggaatttatgctctacaccacggttgggggcacgagttaaacggttgggggcacgagttagtggtccgtgctggtgcgttaaatgattatcatgcaggagaaaatatcactattcattttgatatgacgaaatgtcatttctttgatgcagaaacggaaatagcaattcgctaaatacagggggaaggcattcccccaggataatacaaggaacaataatgaaaaagttattaccctgtaccgcactggtgatgtgtgcgggaatggcctgcgcacaggccgaggaaaggaacgactggcactttaatatcggcgcgatgtacgaaatagaaaacgtcgagggttatggcgaagatatggatgggctggcggagcctagtgtctattttaatgccgccaacgggccgtggagaattgctctggcctattatcaggaagggccggtagattatagcgcgggtaaacgtggaacgtggtttgatcgcccggagctggaggtgcattatcagttcctcgaaaacgatgatttcagtttcggcctgaccggcggtttccgtaattatggttatcactacgttgatgaaccgggtaaagacacggcgaatatgcagcgctggaaaatcgcgccagactgggatgtgaaactgactgacgatttacgtttcaacggttggttgagcatgtataaatttgccaacgatctgaacactaccggttacgctgatacccgtgtcgaaacggaaacaggtctgcaatataccttcaacgaaacggttgccttgcgagtgaactattatctcgagcgcggcttcaatatggacgacagtcgcaataacggtgagttttccacgcaagaaattcgcgcctatttgccgctgacgctcggcaaccacagcgtgacgccgtatacgcgcattgggctggatcgctggagtaactgggactggcaggatgatattgaacgtgaaggccatgattttaaccgtgtaggtttattttacggttatgatttccagaacggactttccgttagcctggaatacgcgtttgagtggcaggatcacgacgaaggcgacagtgataaattccattatgcaggtgtcggcgtaaattacagcttctgataatgggctaaattgccggatgcggcgcgagtactttatccgatctataaatgtaggccggataagatgcgctagcatcgcatctggcattcaggcaaggtagctggtatttatttcagcgtcatatgcgtggcaacggtaatattctgtggactcggttttccagaaattaagcggaataataactcgcagctttgttgacctaactcctgcgtcggaacatcgatgccgcccggtgcaggcgttaaaataaaactcagcgtttcattgctataacccaccaccgctaactgctgcggaatagcaatatttttctctgctgccgcacgataaatgctcattaatttcaggctgtcagtggcaaacaccgcctcaggcaacggactctggcttaataattgccgtgctgcttttaatgcagtttcatgggtataaccgccatcaacaatccattcatcacgcactgcaatattatgcgcagccaggctctgcttataaccattaacgcgatcaacgctaacatggacatcaagcggagcatgcaggcaggcaatattttgatgcccactttcaattaatgcatcggtcaacgcaatgctgtcgccaaaattatcggtatcgacagaataaacatgggcatattgaccttcaactttgccaatcaccaccaccggaatatcatatttatcgagttgggcaaaaaaactctcatccgctgggctactgagcataataatgcctttaatcattttctgcttaattttgctttcgcatttttgcagatcttctgccggattgtggctcgtttgtaatatcacgtcgaaaccttcttcttcagctttggcggtgatggcatgcaaaacttcagagaaaaacggattacccgccgtagttttggtgctacgggtagaaatcaccataatggcatcaaaaccgctagaggtcagcgcgcgggccagcttgtttggctgatactgtaattcttcaatggcccgtaacactttttcgcgcgcttccggggagatattagtttgcttattcagcacgcgacttacggtggatttacttacgcctgcaaccctggcaatatcataaatagtaggggacataggtcaggaactccgtccgaacgtgaatgctgcacatcttatggagttcgccggtcgatgacaacacgggcagttgataatcaatggcctggcccccacattcatatccttacgaatgattttttttctggtcttcagagcagcacaggacagcaatgaagcgacttaaaaatgaactcaatgcgctggtgaatcggggtgtcgacagacatctgcgcctcgctgtaaccggacttagccgcagcggcaaaacagcgtttatcaccgcgatggttaatcagttgcttaatattcacgccggagcacgtttgccgctgttaagtgcggtgcgtgaagagcgcctgctgggcgtgaaacgcattccccagcgtgactttggcattccgcgcttcacctatgacgaagggctggcgcagttatatggcgatccacccgcctggccaacgccaacgcgcggcgtcagtgaaatccgcctggcgctacgttttaaaagcaatgatagcctgctacgccactttaaggatacctccacgctgtatctggaaattgtggattatcccggcgaatggttgctcgacctgccgatgctggcgcaggactatttaagctggagccgccagatgacgggcttactcaatggtcagcgcggagaatggagcgcgaaatggcgaatgatgagcgaagggctggacccgctagcgcctgccgacgaaaaccggctggcggacattgccgccgcgtggaccgattatctccaccactgtaaagagcaggggctgcactttattcagcctgggcgctttgtcttgccgggagatatggcaggtgcgcccgcgctgcaattcttcccgtggccggatgtcgatacctggggcgagtccaaactggcgcaggccgataagcataccaatgccggaatgctgcgcgagcgctttaattattactgcgagaaggtggtgaaggggttctataagaatcattttctgcgctttgaccgccagattgtgctggtggattgcctgcaacctctcaacagtgggccacaggcatttaatgatatgcgtctggcactgacgcagctgatgcaaagttttcactacgggcagcgtaccctgttccggcgtttgtttagcccggttatcgataagctattgtttgctgccactaaagcggaccatgtgaccatcgatcagcacgctaatatggttagtttactgcaacaactgattcaggatgcctggcaaaatgcggcgttcgaagggatcagcatggactgcctggggctggcgagtgttcaggcgaccaccagcggcattattgatgttaacggtgagaaaatcccggcgctgcgtggtaatcgacttagcgatggcgcaccgctcactgtttatcctggcgaagttcccgcacgtttgcctggtcaggcgttctgggataagcaaggcttccagtttgaggcatttcgtccgcaggtgatggatgtcgacaaaccactaccgcatattcgtcttgatgctgcgctggaatttttaataggagataaattgcgatgaccgaaccgttaaaaccacgtattgatttcgacggtcctctggaggtcgatcagaatcctaaattcagggcgcagcagacctttgacgaaaatcaggcgcaaaattttgccccggccacgctcgacgaagcgcaggaagaagaggggcaagtcgaagcggtaatggacgcagcgttacgtccgaaacgcagcctgtggcgcaaaatggtgatgggagggctggctctgtttggcgcaagcgttgtcgggcagggtgtacagtggacaatgaatgcctggcaaacccaggactgggtggcgctgggtggatgtgccgctggggcattgattatcggcgctggcgtaggttctgtggtaacagagtggcggcgcttatggcgcttgcgacagcgcgcccatgaacgcgacgaagcgcgtgatttattgcatagccacggcacgggcaaaggccgcgcattttgcgaaaaactggcgcagcaggcgggtattgatcagagccatccggcgctgcaacgctggtatgccagtatccatgaaacgcaaaacgaccgtgaagtggtcagcctgtatgcgcatttggtccagccagttttagatgcccaggcgcggcgcgaaatcagccgtagcgcggcggaaagtacgttgatgattgcggtcagcccgctggcgttggtcgatatggcgtttatcgcctggcgcaatctgcgtttaattaatcgcatcgccacgctgtatggcattgaactggggtattacagccgtttgcgtctgtttaagctggtattgctgaatatcgcttttgccggagccagcgaactggtgcgcgaagtggggatggactggatgagccaagatctcgctgctcgtttgtctacccgcgcagctcaggggattggtgcaggacttctgacggcacgactcgggattaaagctatggagctttgccgcccgctgccgtggattgacgatgacaaacctcgcctcggggatttccgtcgtcagcttatcggtcaggtgaaagaaacgctgcaaaaaggcaaaacgcccagcgaaaaataatgcaatatcgggtgctgaccggatatctttacgccgaagtgcccgtttttccgtctttgtgtcaatgattgttgacagaaaccttcctgctatccaaatagtgtcatatcatcatattaattgttcttttttcaggtgaaggttcccatgcgtctggaagtcttttgtgaagaccgactcggtctgacccgcgaattactcgatctactcgtgctaagaggcattgatttacgcggtattgagattgatcccattgggcgaatctacctcaattttgctgaactggagtttgagagtttcagcagtctgatggccgaaatacgccgtattgcgggtgttaccgatgtgcgtactgtcccgtggatgccttccgaacgtgagcatctggcgttgagcgcgttactggaggcgttgcctgaacctgtgctctctgtcgatatgaaaagcaaagtggatatggcgaacccggcgagctgtcagctttttgggcaaaaattggatcgcctgcgcaaccataccgccgcacaattgattaacggctttaattttttacgttggctggaaagcgaaccgcaagatagccataacgagcatgtcgttattaatgggcagaatttcctgatggagattacgcctgtttatcttcaggatgaaaatgatcaacacgtcctgaccggtgcggtggtgatgttgcgaagtacgattcgtatgggccgccagttgcaaaatgtcgccgcccaggacgtcagcgccttcagtcaaattgtcgccgtcagcccgaaaatgaagcatgttgtcgaacaggcgcagaaactggcgatgctaagcgcgccgctgctgattacgggtgacacaggtacaggtaaagatctctttgcctacgcctgccatcaggcaagccccagagcgggcaaaccttacctggcgctgaactgtgcgtctataccggaagatgcggtcgagagtgaactgtttggtcatgctccggaagggaagaaaggattctttgagcaggcgaacggtggtagcgtgctgttggatgaaataggggaaatgagtccacggatgcaggcgaaattactgcgtttccttaatgatggcactttccgtcgggttggcgaagaccatgaggtgcatgtcgatgtgcgggtgatttgcgctacgcagaagaatctggtcgaactggtgcaaaaaggcatgttccgtgaagatctctattatcgtctgaacgtgttgacgctcaatctgccgccgctacgtgactgtccgcaggacatcatgccgttaactgagctgttcgtcgcccgctttgccgacgagcagggcgtgccgcgtccgaaactggccgctgacctgaatactgtacttacgcgttatgcgtggccgggaaatgtgcggcagttaaagaacgctatctatcgcgcactgacacaactggacggttatgagctgcgtccacaggatattttgttgccggattatgacgccgcaacggtagccgtgggcgaagatgcgatggaaggtagcctggacgaaatcaccagccgttttgaacgcagcgtattaacccagctttatcgcaattatcccagcacgcgcaaactggcaaaacgtctcggcgttagtcataccgcgattgccaataagttgcgggaatatggtctgagtcagaagaagaacgaagagtaagcgcgaatatgcctgatggtgcaacaccatcaggcatattaaattatgctttcagtacagccagagctgcttcgtaatccggctcggtggtgatttcatccaccagctggctgaaaatcacattgtcattttcgtcaataaccacaacggcacgcgctgccagacctttcagtgggccatcagcaattgccacaccgtaagcttgcagaaattcagcgttacggaaagtggagagggtgataacgttgttcagaccttctgcgccgcagaaacgagactgggcgaacggcagatcggcagagatacacagcacaacggtgttgtcgatctcagttgccagttggttaaacttacgtacacttgcggcgcaaacaccggtatcaatactcgggaaaatgttcagcactttgcgtttacccgcaaactgaccgagggtgacgtcagacagatcttttgccacgagagtaaaagtctgcgctttgctacccgcctgcgggatggaattggcgactgtaaccgggttgccctggaaatgaacggtttgactcatgattatctttcctgtttacatatagttaacgtcacacctagtttatgctaactgtcaataacacagcaaacgctattacagggtctccttacaacaactgtcaacgcagtttgtaattaaaagattaacccatatctggtgaatgaaacagtgatgaaccttctgccagatcaataaatcagaaaaatttaatgatatgacagaaggatagtgagttatgcggaaaaatcaggcaacgttacgcgtatgaccggcaagctgggccagcgcatcgttattttcgatggtgatgtatttacctttgactgccagcatgccgcttttctggaagcgacccagcagacggctgatggtttctaccgtcaggcccagatagttaccgatatcgccacgagtcatcgtcaggcggaattcacgaggggagaagccgcgttgggcaaaacgacgggacaggttgtagatgaatgcagccagacgttcctcggcatttttcttgctcaacagcaggatcatgtcctgatcgcctttgatttcaccgctcatcagacgcatcatctgctgacgcagattcggcattttaccggacaaatcgtccagcgtttcgaacgggatttcacataccatgctggtttccagcgcctgcgcgaagctcgggtgatggccgctgccgatggcgtcaaatcccaccaggtcgcctgctaaatggaaaccagtgatttgctcgtcgccttgctcagtgatggtataacttttaatcgtaccggagcggatggcataaaggcttttaagttcatcaccagccttaaacagcgtctggcctttctgaataggcttcttccgctcaatgatattatcaagctgatcaagctcatgttcgttgagtgtgaacgggatgcaaagctggctgatgctgcaatcctggcaatggatagcacaaccgccagactgaatgcgccgtataattcgcttttccgggatcataggtctgctcaagccgtaattgatatttgtcaattttaacatctttttagggagcaagtaagtctaagcaaaccttaacagcagagaattccgatattagatgtaaatatatgtctatctatttgaaaacccttaagttgttaagggtaactttacataaaagtgtgaacaagctggcacaaattgtttaatgtttacagcaaaagataaccttcatggcgcaataaccactcttttcgctgaactccgcctgcatatccggtcatggtgccgtttcggccaataacccgatggcaaggtacgacgatgctgatgggattgcttccgtttgccgcaccaacggcacgcgccgcgccaggacggcccaattgctcagccagttggccgtaatgcattacctgcccgcaggggatagtgcgtagtgttttccagacttcgcgctgaaatggcgtcccccccgtagcagtgggaagcgtatcaataatgctaagattaccggcaaaatattcacgaagcttgtcgcttaaaccgcctggattggtggcagaaatgcgctcatagccttctttgcgataatggatgtccagcagctgcaccatgcgttcgctgtactcttcccattcaaccgcccgcaggcgaaattgctcatcgcaaatcacccacagtggacccagtggcgtggcaattttttcttcaagtaatctcagcatccgttctctcttaagacaaacgtgggtaaatacccggacctatcggcagaccgacaagataccacgccagcacatcgcagccatactatgcagaaacaatgctgtcgatggctgcttttgcgtcagactgtgctttcgctgccatttccggaccgtatgcgatcccttcggcgaagacaaatttcacatcggtaatgccgataaagccgaggaacgtggacagatacggcgtcaccaggtccgttggtccatctttgtggatcccgccgcggctggtaataacgatggcttttttacccgttaccagaccttccggaccgttctcggtatagcggaaagtaacgcctgcgcgggcaaccaggtcaaaatagtttttcaactgagtcgagatgttgaagttatacatcggtgccgcaataacgataacgtcgtgggctttcagctcggcaatcaactcatcggaaagtgccagagcttcctgctgacgcggagtcagcggcgcatcgctcggacgcagagcgccaaccagttcgccatccagtaccggaatcggatttgcagccaggtcgcgaacggtgatttcatcagcggagtgcttttcgcgccattgttcaacaaaataatcggacaactgattagactgagagtaccctgccaggatgctggatttaagaactaataccttgctcatggtgtttccttatagatgtttgaatgggcgatgccccgttgcttgttgacactttattcacaatcctgccacagagatagcgcaataaatcgaagcctatgttcgaatttattgaacaacgcatagaaagccgcgatgtggtactctatatctatcatttaaaagaaaattaatcaggcagactactgcccactaacgttatgacagaacaacaaaaattgacctttacggccttgcagcagcggctggattcgctgatgctgcgtgacagactgcgtttttctcgccgtctgcacggcgtgaagaaggttaaaaatcctgatgcacaacaggccattttccaggagatggcgaaagagattgaccaggcggcagggaaagtcctgctgcgtgaagcggcacgaccggaaattacttatcctgacaatttaccggttagtcagaaaaaacaggacattctcgaagcgattcgtgatcaccaggtggtgatcgtcgccggggaaacgggttctggtaaaacgactcagttaccgaaaatctgtatggagctggggcgcgggattaaaggactgatcggccatacccagccgcgtcgtctggcggcaagaacagtggcgagccgtattgcggaagagctgaaaacggagccgggcggttgcatcggttacaaagtgcgtttcagcgatcacgtaagtgataacacgatggtcaagctgatgaccgacggtatcctgctggcggagatccagcaagaccgcctgctgatgcagtacgacactatcattattgacgaagcgcacgaacgcagcctgaatatcgattttttgctcggctatttgaaagagttgctgccgcggcgtcctgacctaaaaatcattatcacttccgcgactatcgacccggaacgctttagccgccactttaataatgcgccgattattgaagtctccggtcggacctatccggtggaagtgcgctatcgcccgattgttgaagaagccgatgacaccgagcgcgatcagttgcaggcgatttttgacgccgtagacgaactgagtcaggaaagccatggcgacattctgatctttatgagcggcgagcgggaaatccgcgataccgccgatgcgctgaacaagctgaacttacgccataccgaaatcttgccgctttatgcgcggcttagcaacagcgaacaaaatagggtattccagagccacagcggacggcgcattgtgctggcgaccaacgtcgcggaaacgagcctgaccgtaccggggattaaatacgttatcgaccccggtacagcgcgtatcagccgctacagctatcgcaccaaagtgcagcgtttgccgattgagccgatttcccaggcgtctgccaatcagcgtaaaggccgctgtggtcgtgtgtccgaagggatctgtattcgtctctattccgaagacgatttcctcagccgcccggagtttaccgatccggagattctgcgtaccaacctggccagcgttattttgcagatgaccgcgctggggctgggcgatatcgctgcgttcccgtttgtcgaagcaccggataaacgcaatatccaggatggcgtgcgtctgctcgaagagctgggcgcgatcaccactgatgaacaggccagcgcctataaactgacgccgctcggtcgccagctcagccagttgcctgtcgacccacgtctggcgcgtatggtgctggaagcgcaaaaacatggctgcgtgcgtgaggcgatgattatcacgtccgcgctctccattcaggatccgcgcgaacgtccgatggacaaacagcaggcaagcgacgaaaaacatcgtcgcttccacgacaaagagtctgactttctcgcgtttgtgaatctgtggaattatcttggcgagcagcaaaaggcgctttcttccaacgccttccgtcgcctgtgtcgtaccgattatctcaactatctgcgcgtgcgcgaatggcaggatatctacacccagttgcgtcaggtggtgaaagaacttggcattccggttaacagcgaaccggcggagtatcgcgaaattcacattgcgttgctgaccggtttactttcccatatcggcatgaaagatgccgataaacaagaatataccggcgcacgtaacgcgcgtttctccatcttccccggttctggtttattcaaaaaaccgcctaaatgggtaatggtggcggaactggtagaaaccagccgcctgtgggggcgcattgctgcgcgtatcgacccggaatgggtggagccagttgctcagcatttgattaaacgcacctacagcgaaccgcactgggaacgggcgcagggcgcggtgatggcaacggaaaaagtcactgtttatggtttgccgattgttgccgcgcgcaaggtcaactacagccagatcgatccggcgttatgtcgtgaactctttattcgccacgcgctggtggaaggtgactggcagacgcgtcacgcattcttccgtgaaaacctgaaactacgggcggaagtagaagagctggaacacaaaagtcgtcgccgcgatattctggttgatgacgaaacgttgtttgagttctacgaccagcgcatcagccacgatgtaatctccgctcgccacttcgacagctggtggaaaaaagtcagccgcgaaacgcctgatttgctcaactttgaaaaaagcatgttgatcaaagagggcgcagaaaaaatcagcaagctggattacccgaacttctggcatcagggcaatctcaagctgcgtttgagctatcagtttgagcccggcgcggatgctgacggtgtgaccgtacatattccgctgccgttacttaaccaggttgaggaaagcgggtttgaatggcagatccccggtctgcgccgcgaactggtgattgctctgattaaaagcttgccgaaaccggtacgccgtaattttgtacccgcgccaaactatgccgaagcgtttttaggccgcgtcaaaccgctggagttaccgttgctcgacagccttgagcgcgagttacggcggatgaccggcgttaccgttgaccgcgaagactggcactgggatcaggtgcccgatcacctgaaaattaccttccgcgtggtggatgacaaaaacaagaagctaaaagaagggcgcagcctacaagatctgaaagatgcgctgaaaggcaaagtgcaggaaacgctatctgcggtggcggatgacggtatcgagcagagcggcttacatatctggagttttggtcagctgccggaaagctacgaacagaagcgtggcaactacaaagtgaaggcgtggccggcgctggtggatgagcgcgacagtgtggcgatcaaactgtttgataacccgctggagcaaaagcaggcaatgtggaacggtcttcgccgtctactgctgctgaatattccaagcccaatcaaatatttacatgaaaagttaccgaacaaagccaagctgggactgtactttaacccgtatggcaaagtgctggagctgatcgacgactgtatctcctgcggtgtggataaattgatcgacgccaatggtggcccggtctggacggaagaaggctttgctgcgctgcatgaaaaagtgcgtgccgaactgaacgacacggtggtggatattgcgaagcaggtcgagcaaatccttacggcagtgttcaatatcaacaaacgtctgaaagggcgggtggatatgaccatggcgctggggctttctgacattaaagcgcagatgggcgggttggtatatcgcggttttgtcactggtaacggcttcaaacggctgggcgacacgctgcgatatttgcaggcgattgaaaaacggctggaaaaactggcggttgatccacatcgcgaccgtgcgcagatgctgaaagtcgaaaacgtccagcaggcgtggcagcaatggatcaacaaactgccgcccgcacgtcgtgaggatgaagacgtgaaagagatccgttggatgatagaagagttgcgcgttagttacttcgctcaacaacttggtacgccttatccgattagtgataagcgtattttgcaggcgatggagcagattagcggttaaccctgctatttgcctgataaagaaaaaacccggtaagcatttagcgccgggttttttattaattctaaaacggtaagggtaaaaattcaggaattcagaaaaatacaattctctgctgcaagatgaataatgtttatctacagcatttccttaaaagatatgtcaggcttgcggagtggcggttaaggacatacgatttcctcctttcagagtgctccgcttctcactattatctcacgcagtattcttaagggaacgataaggaggaaccatgaacattaccccgtttccgacgcttagcccggcaactatagatgccataaatgttatcggacagtggctggcgcaggatgatttctccggtgaggtgccgtatcaggccgattgcgtgatccttgcaggcaatgcggttatgccgactatcgatgcggcatgtaagattgcccgcgatcagcaaattcctttactgattagtggtggtatcggtcacagcacaacttttttgtatagcgccatcgcacagcatccgcactacaacactatccgcaccactggcagagcagaagcgaccatcctggcggatatcgctcatcagttctggcacattccgcatgaaaaaatctggattgaagaccagagtacaaactgcggtgaaaacgcacgctttagcatcgcgctattgaatcaggccgtagaacgagttcatacggctatcgttgttcaggaccccaccatgcagcggcgcacgatggcgacgttccgccgtatgactggggacaatcccgatgcaccacgctggttaagttatcccggattcgttcctcagttaggaaataacgcagacagtgtaatctttattaatcagttacaaggattatggccagttgagcgttatctcagtctactcactggcgagctgccgcgtttacgcgatgatagcgatggctacggtccccgcgggcgagattttatcgttcacgttgattttccggcagaagtcatccatgcatggcaaacgctgaaacatgatgcggtgctcatcgaggcgatggaaagtcgcagcttacgttaaaaattgcccgtttgtgaaccacttgtttgcaaacgggcatgactcctgacttttatttctgccttttattccttttacacttgtttttatgaagcccttcacagaattgtcctttcacgattccgtctctctgatgattgatgttaattaacaatgtattcaccgaaaacaaacatataaatcacaggagtcgcccatgagtgtacccgttcaacatcctatgtatatcgatggacagtttgttacctggcgtggagacgcatggattgatgtggtaaaccctgctacagaggctgtcatttcccgcatacccgatggtcaggccgaggatgcccgtaaggcaatcgatgcagcagaacgtgcacaaccagaatgggaagcgttgcctgctattgaacgcgccagttggttgcgcaaaatctccgccgggatccgcgaacgcgccagtgaaatcagtgcgctgattgttgaagaagggggcaagatccagcagctggctgaagtcgaagtggcttttactgccgactatatcgattacatggcggagtgggcacggcgttacgagggcgagattattcaaagcgatcgtccaggagaaaatattcttttgtttaaacgtgcgcttggtgtgactaccggcattctgccgtggaacttcccgttcttcctcattgcccgcaaaatggctcccgctcttttgaccggtaataccatcgtcattaaacctagtgaatttacgccaaacaatgcgattgcattcgccaaaatcgtcgatgaaataggccttccgcgcggcgtgtttaaccttgtactggggcgtggtgaaaccgttgggcaagaactggcgggtaacccaaaggtcgcaatggtcagtatgacaggcagcgtctctgcaggtgagaagatcatggcgactgcggcgaaaaacatcaccaaagtgtgtctggaattggggggtaaagcaccagctatcgtaatggacgatgccgatcttgaactggcagtcaaagccatcgttgatagtcgcgtcattaatagtgggcaagtgtgtaactgtgcagaacgtgtttatgtacagaaaggcatttatgatcagttcgtcaatcggctgggtgaagcgatgcaggcggttcaatttggtaaccccgctgaacgcaacgacattgcgatggggccgttgattaacgccgcggcgctggaaagggtcgagcaaaaagtggcgcgcgcagtagaagaaggggcgagagtggcgttcggtggcaaagcggtagaggggaaaggatattattatccgccgacattgctgctggatgttcgccaggaaatgagcattatgcatgaggaaacctttggcccggtgctgccagttgtcgcatttgacacgctggaagatgctatcagtatggctaatgacagtgattacggcctgaccagtagtatctatacccaaaatctgaacgtcgcgatgaaagccattaaagggctgaagtttggtgaaacttacatcaaccgtgaaaacttcgaagctatgcaaggcttccacgccggatggcgtaaatccggtattggcggcgcagatggtaaacatggcttgcatgaatatctgcagacccaggtggtttatttacagtcttaatgagtgaaagaggcggaggttttttcctccgcctgtgcgcgtcagagtttagcgaatttttcgagggtgcgaataagctgtgtgacgaagccatattcgttatcgtaccaggcgaccgttttcaccagttgtaaatcgcccacggcggtaatttccgtttgcgtggcatcaaacaccgaaccgaaatggctgccaatgatatcggaagagactatttcttcatcggtataaccaaatgactcgttattggtggttgcttgtttaagtgcgttattcacctcttcggcagtcacttttttccgagaatcgataccagttcagtgaccgaacctgttttcaccggcacgcgttgcgcatgacctttcagtttgccgctcagttccgggatcaccagaccaatggcttttgccgcccccgtagtgtggggaatgatattttctgccgctgcgcgtgaagcacgtaaatctttaccacgcgggccatccaccagtgactgggtgccagtataggcatgaatggtcgtcatcgtgccgacttctatcccgaaactgtcatgcaaggctttggccatcggcgcaagacagttagtggtgcatgacgccacggaaacaatggtgtcgttgccatccagagtgtcgtcattgacgttataaacgatagttttcatttcaccggcaggggcggaaatcaacaccttcttcgcaccagcatcaagatgcgcctgcgatttctcggcggaggtataaaagccagtacattcgacaatgatttctgcacctttcgctttccacggaatatttttagcctctttttcggcgtaaaccgcgatacttttcccatcaacgataagtgaatcttccgtaaaatcaacgctccaggggaatggtccgtagtttgaatcatgtttcagcaggtaggcgagaatttatggggaagtgagatcattaatagcgacaacgtctatgttgcttttgacttcaagtaatcgacccaacaccagtcgaccgatacgaccaaaaccgttaataccaactttactcatggttttctcctgtcaggaacgttcggatgaaaattgatcctttccaagcttagaccaggatggcgggatgggcaatctccattctcacagtgaaacgtaacgtactgaaaacgggtgaacaatatttaatgaaattttgagaaaagcccgttatgttaacggaaaattatgttaaagcaggaaatgttatggaaaataaatatagtaggttacaaatcagcattcactggctggtctttttactggttatcgcagcgtattgcgcaatggagtttcgtggtttcttcccacgtagcgatcggccactcatcaacatgattcatgtttcctgtggcatcagtattctcgtgctgatggtcgttcgtcttttgttaaggctgaaatacccaaccccgccgattatacctaagccaaaaccgatgatgacgggactggcgcatttgggacatttggtgatttatctcctgtttattgcgctgccagtgattggtttggtgatgatgtataaccggggcaacccgtggtttgcgtttggtttgacgatgccttacgctagtgaggccaatttcgaacgggtagatagcttaaagagctggcatgaaacgctggcgaatctgggatattttgttatcgggttgcacgctgcggctgcactggcacaccactatttctggaaggacaacacacttctacgcatgatgccgcgtaaacgttcctgaaggatatttaaagaaaacgcctgtactaaaaccgacccgtggtacaggcgaagaatacgggtctacatcggaagcgcctattatatttatttgtatgataaataaaaccataatccttgcccatacgtccatctggcttatttttaatcaattcacccgatctttgatctcatcaacggtatcaaaataaaccagcgtataacgttcaaatcgaacataagattcgataaaccatggaggttatatgaaaaaactggcacttattttgtttatgggaacgcttgtttccttttatgccgatgccgggcgcaaaccctgttctggtagcaaaggggggatcagtcactgtacggcaggcggcaaatttgtctgtaatgatggttctattagtgcaagcaaaaaaacatgcactaactgaagtgtaaaaggggtgccatgagaaaatgaatctgctagtcaaatgcgcggggaaaatccccgcgcttgcccttacctggacgtgcaggccatgagcgcagcaacctccttatcaccgtcccggaaccgcagttcgtagagcgtttgtcgggtcaggagtgtgaatgtcagaatcgtaatgcagataatgagcagacacaccaccagagggttgtgcttcatagcctttctccttgccggatggcgggtaagaggctaagatctgaattgctaggttcattcgttggcctcggttgatagaaatatcggtcggggccttcgtctttctgattcccggttagcctgaaaacagaaagtctcaggcacccgcaggcatcctatgaggtttccttagggacgaaaataatcacttcacgaaattgcgtgctgttttccagaatttttcgtcattcgggttagccagtttagccattcgttactctcttcattccaatagcattaattttctatgcaataattgttgtaaaaatgtgacgcaaagaggtttttggtcataagtaattaccgtcaagtgccgatgactttctatcaggagtaaacctggacgagagacaacggtaatgaatacaactcccagtcagcgattaggttttttgcatcacatcaggttggttccgttatttgcctgcattctaggcggtatcttagttctattcgcattaagtagtgccctggctggctatttcctctggcaggccgatcgcgatcagcgtgatgttactgcggagattgagattcggaccgggttagcgaacagtagtgattttttgcgtagtgcccggatcaatatgattcaggccggggctgcgagtcgtattgcggaaatggaagcaatgaagcgaaatattgcgcaagccgaaagcgagattaaacagagccagcaaggttatcgtgcttatcagaatcgaccggtgaaaacacctgctgatgaagccctcgacactgaattaaatcaacgctttcaggcttatatcacgggtatgcaacctatgttgaaatatgccaaaaatggcatgtttgaagcgattatcaatcatgaaagtgagcagatccgaccgctggataatgcttataccgatattttgaacaaagccgttaagatacgtagcaccagagccaaccaactggcggaactggcccatcagcgcacccgcctgggtgggatgttcatgattggcgcgtttgtgcttgccctggtcatgacgctgataacatttatggtgctacgtcggatcgtcattcgtccactgcaacatgccgcacaacggattgaaaaaatcgccagtggcgatctgacgatgaatgatgaaccggcgggtcgtaatgaaatcggtcgcttaagtcgtcatttacagcaaatgcagcatagtctggggatgacagtagggactgttcgacagggcgcggaagagatttatcgtggcaccagcgaaattagtgctggcaatgcggacctgagttctcgcaccgaagaacaagcggcggctatcgaacaaactgccgccagcatggagcaactcactgcgacggtgaaacagaatgcggataacgcgcatcatgccagcaaactggcgcaagaggcttctattaaagccagcgatggcgggcagacggtttccggtgtagtaaaaacgatgggcgctatctccacgagtagcaagaaaatttctgagatcaccgccgtcatcaacagtattgctttccagacgaatattctggcactgaatgctgccgttgaagccgcgcgagcgggtgagcaagggcgtggatttgccgttgtcgccagcgaagtacggacactcgcaagtcgcagcgctcaggcggcgaaagagattgaaggcttgatcagtgaaagtgtcaggttaattgacctggggagcgatgaggtggcaacggccgggaaaaccatgagcactattgttgatgccgtcgcgagtgtcacacatatcatgcaggaaatcgccgccgccagcgatgaacaaagtagaggcataacgcaggttagccaggcgatttctgaaatggataaggtgacgcaacagaatgcttctctggtagaagaggccagtgcggcggcggtgtcccttgaagaacaggcggcacgattaactgaggcggtggatgtattccgtctgcacaaacattctgtgagcgcagaacctcgcggagcgggtgaaccagttagtttcgctacggtgtgaaaatgttcaaggagggatcgacagatcccttcacctttcagaacggcatactttttcgaatagcgttaatcatcaactggcaaccagaagagaacgtcgcatctacgcgggtcagtattccaatcggttcgcctgcaccatgtcccggaacaggcagggccaccagcgtggcatgacgcaggtcgtcttttacagcgccagaagggacaaaccacacgtaatcgtattcaaccgtaagttgacgagataggctagcagacagcgtttcgatacaaccgctaggaattttacagccctggctctgcactaatgcatcactatgctggcgtggcgcagtgccttctggacttacaacgaccggccattccagcacccggcttagcgttacgttctcctgaagtagcgggtgattagggcggacaaccagcttcaagctttcaagaaacagcagttcgtaattaagcccggtcatcagttcaggatcactcatccgaccaatgccgatatcgatttccccggtttttaaacccgccagaatcatagggttactcattgtcgcaacttgcaaggtcgtctctttttgttgctgatgaaactgacctataacgctaggtaatatccccagtgccgcagtaggtagtgcaccaaccctgacgacatcattattaagaccttctttacgatgaaggctccgtccggcagtgttgatggcgtcaagaactctgactgcatgcgttaaaaattgttcgccgggtaaggtaagttgcgccccctgacgaccacgctcaaacaagcgagcgccagtcagctgctccagttcattcaatgtcttagagagcgcaggttgactcaaattaagggtttcagccgcgcgccccaaagttccttgttgtgcgacagctacgaatgtatgaaggtggcgcaaacggatgcgctgactaaacagactatttttttccataagcgatgttaaaaacgaagcggtgtcgctgacaagtgaagttgtttgattatgataacttgattgcaaaatattattaacaattaaagcaattatgttacagcaaaatggataatattgatgttttcgcggcgagatcacagtttgtaaattcttcccgcaagagtgaatgcggttacctacactccagattactgaccactggaggcagacactatggcgaacagcatcacggcggatgagattcgggaacagtttagccaggcaatgagtgccatgtaccagcaagaagttccgcaatatggcacgctgctggaactggtagctgatgtgaatctggctgtgctggaaaacaatcctcaactgcacgaaaaaatggtaaatgcagacgagctggcgcgactgaatgttgaacgtcatggggcgattcgcgttgggactgcacaagagcttgctactcttcggcggatgtttgccattatggggatgtacccggtgagctattacgatctcagccaggcaggggtgccggtacatagcacagcatttcggcccattgatgatgcttctctggcgcgtaatcccttccgcgtttttacctccttactccgccttgagcttatcgagaacgaaattttgcgccagaaagcggcggagattctgcgtcagcgcgatatcttcaccccacgttgtcgacaactgttagaggaatatgagcagcagggcggctttaacgaaacacaggcacaggagtttgtgcaggaagccctggaaacgtttcgctggcaccagagtgcaacggtagatgaagaaacctatcgcgcattgcacaacgaacatcggttgattgctgatgtggtctgttttcctggatgccatatcaaccacctgacgccacgtacgctggatattgaccgggtgcagagcatgatgcctgaatgcggaattgaacccaaaattctcatcgaggggccgccgcgccgcgaggtaccgattttactacgccagaccagctttaaagcactggaagagacggtgttgtttgcggggcagaaacagggcacgcataccgcgcgctttggtgaaattgagcagcgtggcgtggcattaacgccgaaagggcgacaactgtatgatgatcttctgcgtaacgctggaaccgggcaggataatctcactcaccaaatgcatttacaggaaaccttccgcacttttcctgacagtgagtttttaatgcgtcagcaagggttggcatggttccggtaccgtctgacgcctagcggtgaggcgcatcgtcaggcgattcatcctggagacgatccacagcccttaattgaacgtggttgggtagtggcgcaacccatcacctatgaagatttcttgcccgttagcgcggcggggatcttccagagtaatctgggtaatgaaacgcagacacgcagtcacggtaatgccagtcgcgaagcatttgagcaggcgttgggttgtccggttttggatgagttccagctttaccaggaagcggaagaacgcagtaaacgtcgctgtggtttgctttaaaatctgaccatccgcctttgcaaaaatttgcctgattttacaaacgaatcaggctcatcccatcgacataaaaaaaatgccgatttatgcatattctctcagttcaacaattggattattaataaatattgtctagagtgagcggtcataaataagcactttcttgccgctgaaaacgaccagcgcgggaccattcacaacaccagaaggactcactttcaggtatggatcgtagacgatttattaaaggttcaatggctatggccgccgtgtgcggtaccagcggcattgcttctcttttttctcaggcggcattcgcggcagattctgatattgccgacgggcaaacccagcgttttgacttctccattctacagagtatggcgcacgacttagcgcaaacagcgtggcgtggtgcgcctcgtccgttacctgacacgctggcgacaatgacgccgcaggcttataacagtattcaatacgacgccgaaaaaagcctctggcataacgttgagaaccgtcaactggacgctcagttcttccatatgggaatgggattccgtcgccgcgttcgtatgttttctgtagatccagcaacacatctggcgcgtgaaattcactttcgcccggagttgttcaaatacaacgatgcaggtgttgatacaaaacaattagaagggcaaagcgatctcggctttgccggttttcgcgtgtttaaagcccccgaactggcgcgccgtgatgtagtaagttttctcggcgcgagttatttccgcgccgttgatgatacatatcaatacggtttgagcgcccgcggcctggcgatcgacacttacaccgacagtaaagaagagttccccgactttaccgccttctggtttgatacggtaaaaccgggggcaactacctttaccgtttatgcgttgctcgatagcgccagcattactggtgcctataagttcactatccattgtgagaaaagtcaggtgattatggatgtggaaaatcacctgtatgcgcgcaaagacattaaacagctgggcattgcgccgatgaccagtatgttcagctgcggtactaatgaacgtcggatgtgcgatacaattcatccgcaaattcatgactctgatcgtctgtccatgtggcggggcaacggcgagtggatttgccgtccgctgaataatccgcaaaaattgcagttcaatgcttacaccgacaacaacccgaaagggtttggtttattgcaactggatcgtgacttctcccattatcaggacattatgggctggtataacaaacgcccaagtctgtgggtggaaccgcgtaacaagtggggtaagggcaccatcggcctgatggaaatcccaacaacgggcgaaacgctggataacattgtctgcttctggcagccagaaaaagctgtaaaagcaggtgatgagtttgcattccagtatcgtctgtactggagtgcgcaaccgcctgttcattgcccattagcgcgcgttatggcgacgcgtaccggcatgggcggtttcagcgaaggttgggcgccaggtgaacactatcccgaaaaatgggcgcgtcgttttgccgtcgatttcgttggtggtgatctgaaagctgccgcgccaaaaggcattgagccggtgattacgctttccagtggggaagcgaagcaaatcgaaattctctatattgaacccatcgatggttatcgtattcagtttgactggtatccgactagcgactccactgatccggtcgatatgcggatgtatctacgttgtcagggggacgctatcagtgaaacatggctgtatcagtatttcccgccagcgccggataaacgtcagtatgttgacgaccgcgtgatgagttaatcgttttttcttcggcaccttcttcgggaggtgccgtctggttaaacacgatcccgctcgcatttttccctaagttaaatgagtaatctgatggtgtgtatttcagatacaccttgtcagccactaacagggagtgcgtatgtttccagaataccgagatttaatatcccgtctgaaaaacgaaaatcctcgctttatgtccttgttcgataaacacaataaacttgatcatgaaattgccagaaaggaaggttccgacggtcgagggtacaatgcggaagtggtccgcatgaaaaaacaaaagctacagttaaaagatgagatgctcaaaatcctgcagcaggagagcgtcaaagaggtgtaaactttcctaagccgccagccaggcggcttttttaacaactgcatggattgactggagataagatgactgaaacgataaaagtaagcgaaagtcttgaattacatgctgttgcagaaaatcacgtcaaacctctttatcagttaatctgtaaaaataaaacctggttacagcagagcctaaactggccgcagtttgttcaaagtgaagaggacacgcgaaaaacggtgcagggtaatgtgatgttgcatcaacgcggctatgccaaaatgttcatgattttcaaagaagatgaacttatcggcgttatcagctttaatcgtattgaaccactgaataaaaccgctgaaatgggctactggctggacgaatctcatcaggggcaggggatcatttctcaggcgctgcaggcattgattcatcattacgcccagtctggtgaacttagacgcttcgtgatcaaatgtcgggtggacaatccgcaaagcaaccaggtcgctttgcgcaatggttttatccttgaaggttgcctgaaacaggctgagttcctgaatgatgcctatgatgatgtgaacttatacgcgcgtattatcgatagtcaataatcacaataaccctgccagcggcgttcgcgtaatgcgctcctcgccgttaatgacttttggaccacggacatgaaccgtgtcgccatcaaaggcttcaacgacggcgtggtcggttaactccacatggttttcaattatcaccgcacctgtaatacggctctcaccttgtatgacaacgtgctcgtcgagcagaatcggtccgccacgtaccacggcatttccgccaaccaagacatgatgttttaacacacaattaccttccacaatggcatattccgccacctggctactgtaatgaatcgtcggaatggcatcttcttctatgccagctttcacctgcgcgtgaccgtagactttagcgcaatcgcatagccagacattgttctcttcattaccttcaatactggcaaaatcaaaaacttcggcgcgatgttcaataaaagcataccggacgacggcatcgccataaatttgtgcctggtggacaatacggctggcgctaacccttgcgcgatcataaatttggagcaggagttgatggtcgggcgttaagccttgtgcggcgacgatcatagaatgttgatcaattaaggcgtgaccaaatattctacattgcccgtaaactaaactgtcatgaatggtgacgctgtcacttatatatgcaccctggctgatttcactattatcgatccagacgttatccgttgcgtaaacctctccccacagcacgctggtgccggtgatacgcgtattaccggaaatcaccgctccgccgaacgcaatagcattctggtcgtaaatccagcaatttccttcttgtgctaacaccgtttcgcgatcgatccagccgccagcggttcctgctatcacatcgttaaaatcgctaatggcgataatctgccgtaataacacattttttttagtgccatcttcctgataactaaaggctcgctgttcttcacttagacgatatttgcgcatagcgttttcccacaggtgacttactataaccgtagcaaattctgcggctctggctatgctcgagaaaattccataaaatgcatttcaaatatactttataaattaaacaaaatgagtaagaagatgcagagcgataaagtgctcaatttgccggcaggctactttggtattgtgttggggacgatagggatgggatttgcctggcgctatgccagccaggtttggcaggtcagtcactggttaggggatgggctggtgattctggcgatgatcatctggggattattgactagcgcatttattgcccgactcatacgctttccgcatagcgtgctggcggaagttcgccatccagtgctgagcagttttgtgagtttgtttccggcaacgacgatgctggtggcgattggttttgttccgtggtttcgcccactggcggtgtgcctgttcagttttggtgtcgtggttcagttggcttatgccgcctggcaaactgcgggattatggcgcggatctcaccctgaagaagctaccacgcctggactgtatctgccgacagttgccaacaactttatcagcgcaatggcctgtggtgcgttgggctacaccgacgccggtctggtgtttttaggcgcaggcgttttcagttggctaagccttgaaccggtgatcttgcagcgtctgcgcagtagcggagaattacccacggcactgcggacaagtctcggcattcagctcgctcctgcgctggtggcttgtagtgcctggctgagcgtcaacggcggcgagggtgacacgctggcgaaaatgcttttcggttatggactgctgcaactgctgtttatgctacgtctgatgccatggtatctctcccagccatttaatgctagtttctggagtttcagcttcggcgtatctgcactggcaaccaccggtttgcatctggggagtggcagcgataatggatttttccatacgctggcggtgccgctgtttatctttaccaattttattattgcaatactgctcatccgtacttttgcgcttctgatgcagggaaaattgttagtcagaaccgagcgcgccgttttaatgaaagcagaggacaaagaatgatcattcgtgacgaaaactattttactgataaatatgaattaacccgcacacactctgaagtactggaagcggtgaaagtggttaaaccgggtaaaacgctggatctgggctgtggcaatggtcgtaacagtctttacctggcagccaatggttatgatgttgacgcatgggataaaaatgccatgagtatcgccaacgtcgagcgcattaaatccattgaaaatctggataatttacacacccgagtcgttgatctgaataacctcacatttgatagacagtacgattttattcttagcactgtggtgctgatgttccttgaggctaaaaccatccccgggttgattgccaatatgcaacgttgcactaaacctggtggttacaacctgattgtggcggcgatggataccgctgattatccatgtaccgtcggcttcccgtttgccttcaaagagggagaattacgtcgatattacgaaggctgggagagggtgaaatacaatgaagacgtcggcgagctgcaccgcaccgacgccaacggtaatcgtattaaactgcgtttcgccacgatgctggcacgtaaaaaatgacccggtaagcacaaaacgcgtgaaaattccccacgctgagatgatttactgttcttcttttcggtaagcatattttttatcgaagggatgtgaaattaatcacagtagtcgaagtttttagcagcttaacttactgaaatttaagtactgatgattgacttagcccctttttcggcattgactatgtcgtctgaaaaggggctgaaaaatttattttcaccaacactttttttgccacaacacgaagcggcgctttttgctataacttagaaagtaatataatcatctcaggaaactattcatgcgtaccacaagttttgcgaaagttgcagctttatgcggcttattggctctgtctggttgtgcatctaaaatcacccagccagataaatattctggttttttaaacaattactctgatttaaaagaaacaaccagcgctacaggtaaacctgttttacgttgggtagacccgagttttgatcaaagcaaatatgacagcatcgtctggaacccaatcacttattatccggtaccgaaaccgagcacccaggtagggcagaaagttctggataaaattttgaactataccaacaccgaaatgaaagaagcgatagcgcagcgtaaaccactggttaccaccgctgggccgcgtagtctgattttccgtggggccattaccggtgtagataccagcaaagaagggctgcaattctatgaagtggttcctgttgcattagtggttgcggggacgcaaatggctacaggccaccgtaccatggatactcgcctctattttgaaggtgagctgattgatgcagcgactaataaaccggttatcaaagtcgttcgtcagggcgaaggtaaagacctgaataacgaaagtacgccaatggctttcgaaaatattaaacaagttattgatgacatggcgaccgatgccaccatgtttgacgttaacaaaaagtaattccagacgcgccatcgttagatggcgctttttatccggtgcgccgtaaaaccccatccttcagggcggggatataaggcgcggttttccacctgaccaggtgtttgctgttgttcaatgtattggcggatgacggatattggcgcacctccgcagctactggcaaaatagccaggactccacaaaacgcctttgtagtaatacctgaatgcaatatctggtcgatctcgtcgcagtcacctacccgatacgcctttgaggctgtttaccagactggatatcgccagtttgggaggatagttaattaacaaatggacgtgatctggttcgccatccatttcaaccagttcagcttcaaaatcagcacatacatttgaaaagtaagtgcgtagtttttctgtcgcgtcatggtcaaaaatctggcgtcggtatctggtgacaaagagcaggtgaacatgcatcaggaaaacacaatgccttccacgccggatatcggtttcttttttcacagaccaaagtatcatttgacctgtgaaacgattacaggcatttaaattccagttaagacccggtggtcaacaggagtgtgaaatgaggcgcttcgcaggcgcatgtcgtttcgttttcaatcgtgctctggcacgtcagaatgagaatcatgaggccggtaataaatacatcccttacgggaaaatggcttcctggctggttgagtggaaaaatgccactgaaacgcaatggcttaaagattctcccagtcagccattgcaacagagtctgaaagaccttgagcgggcttacaaaaacttcttccggaagcgggctgcttttccccgattcaaaaagcggggacagaatgatgcattccgctacccgcagggcgttaagctcgatcaggaaaacagccgtatttttctgccgaaactgggctggatgcgctaccggaacagccgtcaggtcacgggtgttgtgaaaaatgtcactgtcagccagtcctgcggtaagtggtacatcagtattcagacagaaagtgaagtaagtactccggttcaccctagtgcaagtatggtcgggctggatgctggcgtggctaaactcgccacgctgagtgatggcacagtctttgagcctgtaaacagttttcagaaaaaccagaagaagctggcgagacttcagcgacagttaagccgcaaggtcaaattcagcaacaactggcaaaagcagaaacgcaaaatacagcgactgcattcctgtatcgcaaatatccgcagggactaccttcacaaagtcacaacggccgtcagcaaaaaccacgcaatgatagtcattgaggatttgaaggtcagcaacatgagtaagagtgcagcgggtacggtcagccagccggggcgcaatgtccgggcaaaaagtggtttaaaccgtagcatactggatcagggctggtatgaaatgcgccgccagcttgcgtataagcagctctggcgtggcggtcaggtgcttgctgttccgccagcgtatacaagccagcgttgcgcgtactgtggtcatacagcgaaagagaaccgcctgagtcaaagtaaattcagatgccaggtatgtggatatacagcgaacgccgatgtaaatggcgctcgcaacattttagcggcggggcacgccgttcttgcctgtggagagatggtgcagagtggccgcccgttgaagcaggaacccaccgaaatgattcaggcgacagcctgaacgtagcagggatccacgtccttcagggcgtggaggatgtcaatatcggtttctgtcagcgattaaattcaacaccacgtaacaaacgcctccggcaattaatccccaaaacgcagaaccaatcccgaccagcgtcaatccacttgccgttaccagaaatgccaccaccgccgcgtctcgctcacgctcattatgcagcgcctgatacaaactgccgccgatggtacttaacagcgccagacctgccagcatctggatccaacttacgggcagggcagccatcatcccggtaatggcactaccaaacagacctgcgagcaaatagaaaatgcctgcaacggcagcggccagccaacgttgatctttatccggatgcgcttccgggctttggcaaatagccgcggtgattgccgcaataccgacggaataaacgccgaaaggggaaaaaaccagtgccagcaatccagtaaatacaattaatgggctaacaggagcgctatatccagctgctttcattgctgcgatacccggtgcgttttggcttgccatcgtcaccagaaaaagggggagtgcaacgctcaggctgtgagcaaagctaaaatcaggggtaatataagtggggagaacgggtttaaagacaacatcagttgtgacaacgtcaccttgcgcgatgacgatcacgatcccaataatcatcgcggcaattaccgcatagcgcggcgcaacggccttggttgccagccataccagcaacatacttccacacaacgtaaattgaccgtccagactggcaaacgcctgtaaaccaaagcgtaataaaatcccggcaagcattgccgccgcaaggctgtgcggaataatgcgcatcagacgagcaaagagtcccgttatgccgcagaggactattagcgcgttggtgacaataaaaacgccgatggcttcgttaagtgttagtccctgcaatccggtgaccaacaaagccgcgccaggcgtactccatgcggtgagaacaggtacgcgataccataatgtcagagtcagcgtactgacgcccattgccagccccagcgccgtcatccagccagagatttgtgcagtggtggctccggcgacaatcgctgcttgccagattattgccgcactactggcgtagccaattaataccgccagaaaccccgccagtagcgtgggtggaggaatagaaaacagacgcatagtcacctcgtgcgttatagcgtacaggcaccgtagcatttgtccgttataacgcacaagtgataaacttccgttttgccggaggagtcgcatggaaaatctcgctcgctttttatccaccacacttaaacaactacgccagcagcgcggctggagtcttagccgactggcagaagcgacgggcgtttctaaagcaatgttagggcagattgagcgtaatgagtccagtccgacggtcgcgacattatggaaaattgccaccgggttgaacgtaccatttagtacatttatttctccgccgcagtccgctacgcctagtgtttatgatccacaacagtaggcgatggtgatcactagcctgtttccttatgatccacaactctgctttgaacacttcagcattcagatggcatctggtgcaataagcgaaagcacgccccatgagaagggggtaatcgaacatgtcgtcgtcattgatggacaacttgatctgtgcgttgatggggaatggcagacccttaattgtggggaaggcgttcgatttgctgcagacgtcacgcatatctatcgtaatggtggggagcaaaccgtacattttcattccctcatccattacccgcgcagttaagcgggaaaactatttcgcaacgtcgcgcttgtggctaaaatagccgccatttttcagctactggataagaatgtgaccgtatcttctcatcgacttgaactgttaagcccggcacgcgatgccgccattgcccgcgaagctattttgcacggtgccgatgctgtttatatcggcggccctggttttggtgcccgtcataatgccagtaatagcttgaaagatattgccgagctggtgccgtttgcccatcgttatggtgcaaaaattttcgtcacgcttaacaccattttgcatgatgatgagctggaacccgcgcaacggctgattactgacctctaccagaccggtgtcgatgcgctgattgttcaggatatggggattctggaacttgatattccgccgattgaactgcacgccagtacgcagtgcgacattcgtacagttgaaaaagcgaagttcctctctgatgttggcttcacgcagattgtgctggcgcgagagctgaatcttgatcagatccgcgcgattcaccaggctacggacgcgaccattgaattctttattcatggggcactgtgcgtggcctatagcggtcagtgctacatttctcatgcgcaaacagggcgtagcgccaaccgtggcgattgcagccaggcgtgccgtttgccatacacattgaaagacgatcaggggcgggtggtttcctatgaaaaacatctgctgagcatgaaagataacgatcagactgccaacctcggcgcgctgattgatgctggtgtacgctccttcaagattgaagggcgttacaaagatatgagctacgtgaagaatatcaccgcccattatcgccagatgcttgatgccattattgaagaacgtggcgatctggcgcgcgctagtagtggtcgtactgaacatttctttgttccaagcacggaaaagactttccaccgtggtagcacagattattttgtgaatgcccgtaaaggcgatattggcgcgttcgatagcccgaaatttatcggcctgccggtaggcgaagtagtgaaagtggcgaaagatcatctcgatgttgccgttaccgagccactggcaaatggcgatggcctgaacgtgttgattaaacgtgaagtcgtcggttttcgtgccaatacggtcgagaaaaccggagaaaatcagtaccgcgtctggcccaatgaaatgccagcagatttgcacaaaattcgtccacatcacccactaaaccgtaatcttgatcataactggcagcaggcactgacaaaaacctccagcgaacgtcgggtggcggtagacattgaactgggcggctggcaggaacaactgattctgaccctcaccagtgaagagggtgtcagcatcacgcatacgctggacgggcagttcgacgaagccaataacgccgaaaaagcaatgaacaatctgaaggatggtctggcaaaactggggcaaaccctctattacgcccgcgatgtgcaaattaatttgccgggggcgctgtttgtaccaaacagtctgttaaaccagttccgccgtgaagctgctgacatgctggatgctgcgcgtcttgccagttaccagcgcggcagccgtaaaccggttgctgatcctgcgccggtttatccgcaaacgcatctgagtttcctcgcgaacgtatacaaccagaaagcgcgtgaattttatcatcgctatggtgtgcagctgattgacgcggcgtatgaagcacatgaagagaagggcgaagtcccggtgatgatcaccaagcattgtctgcgctttgcctttaatctgtgcccgaaacaggcgaaaggcaatatcaaaagctggaaggcgacgccaatgcaactggttaacggcgatgaagtattaacgctaaagtttgattgccgcccatgcgagatgcacgtcattggcaaaatcaaaaatcacatactgaaaatgccgttaccgggaagcgtagtggcatccgtaagtccggatgagctgctgaaaacattgccgaagcgaaaagggtaaaacgccagttttctggttactcacaacttattgaatctgcatgatattgcctgccgggtaaggcgttacgccgcatccggcatcaaatgactcaacgttgtcccgcttctggtttgcggcttttttgccagtaaaaatgctcgcgcaaaccttccgcgctctcttccgccacagcacgcaattcatcgctgtccgcttcatgacgcagctgatgatccacattctttacccacacaaattcatgtcctttgtgccctgccatgagttgtccactaaacagagcacacgttaataagacaacgcttaacgccttcgtaaacatcctgccacctttttcttaccttttgccgctatgatgccgatcgtttcttgaggttattattcagttttgcaaattagcgcaaagaaattctggaatcttccttcctgattttgcattgcattctgccgttgcggcgatttagtgctattttcgagcaaattacacacggaggtaaacactaatgtttactttgttgatatactcagcggcagggaggcgatgtgaaacaaagcgagttcagacgttggctcgaatctcagggcgtcgatgtagcgaatggcagcaaccatttgaaactcaggtttcatgggaggcgcagtgtcatgccgcgtcacccctgcgatgagattaaagaaccattgcgtaaagcaatcctgaaacaactcggtttgagttaatcgccaattaaaaaggttaatgacatgcgagagacagtcgaaattatgcgttatcccgtcactcttacacccgcgccggaaggcggttatatggtttcttttgtggatatccctgaagcgttgacccagggcgaaactgtcgctgaagcgatggaagcggcaaaagatgctttactgaccgcatttgatttttattttgaagataacgagcttatccctttacctagcccattaaatagtcacgatcactttattgaagtacctttgagcgtcgcctctaaggtattgctgttaaatgcttttttacagagtgaaatcactcagcaagagttagccaggcgaattggcaaacctaaacaggagattactcgcctatttaacttgcatcatgcgacaaaaatcgacgccgtccagctcgcggcaaaggcgcttggcaaagagttaagcctggtgatggtttaattacagttaacgaaaagttgtcatttttaacaactgatatagactgccgaatcatctgcacataattacgattcgataatgaaaaaataccagcagcttgcagaacaattacgcgagcagattgcgagcggtatctggcaacccggcgatcgtttgcctagcttgcgtgaccaggtggcgcttagtggcatgagctttatgactgtcagccatgcctatcagttgctcgaaagtcagggatatattatcgcacgaccgcagagcggttattacgttgcgccacaggcaataaaaatgccgaaagcgccagtcattccagtcactcgagatgaagcagtcgatatcaacacttatatttttgatatgttgcaggccagtcgcgatccgagcgtcgttccgtttgccagcgcctttcccgacccgcgacttttccccctccaacaactaaaccgcagcctggcgcaggtaagcaaaaccgccacagcgatgagcgtgattgaaaacttaccgccaggaaacgcagaactgcgtcaggctattgctcgtcgctatgccttacagggcatcaccatttctcctgatgaaattgtcattactgccggggcgttagaggcattaaacctcagtttgcaagcggtaactgaaccgggcgattgggtgatagtagagaatccttgtttctacggtgcgttgcaggcgctggagcggctacggctgaaggcgttaagcgtggcgacggatgttaaagaagggatagatcttcaggcgctggaactggcgttgcaggagtatccggtgaaagcgtgctggctgatgactaatagccagaatccactcggatttaccttaacgccgcaaaaaaaagcacaactggtggcgttgctcaatcagtacaacgtaacgctgattgaagatgacgtttacagcgaactttattttggacgggaaaaaccgctgcctgcgaaagcgtgggatcgccacgatggcgttttgcattgctctagctttagcaaatgtctggtgcctggttttcgtattggttgggtcgccgccggaaaacatgcacgtaaaattcaacgcttgcagttgatgagtacgctttccaccagcagtccgatgcaacttgcgctggtggattacctttccacgcgccgatacgacgcccatcttcgtcgcctgcgtcgccagcttgcggaacgtaaacaacgtgcctggcaggcactgctgcgttatctgcctgcggaagtgaaaattcatcataatgacagtggttactttctctggttggagctccccgagccgttagatgccggcgaattaagcctggcggcactgacgcatcatatcagtattgcgccgggtaaaatgttttctaccggtgaaaactggagtcgttttttccgttttaataccgcgtggcagtggggagagcgtgaagaacaggcggtaaaacaattaggcaaacttattcaagaacggctgtaatagcgtttaatttaattcctcttagattgggtaatatgaatttcgaatagcagtcatatttcctaactccttgactatactccagaagataaccttacagacggcataatgcgcggtagctcacaacctgaataaattttctcaggggcgaaggtgtgcctgcaagccgccgtctatggttaaacaaggagatatttttacggcacggcggctgaacaattaattacgacaggagtaagaccttatgagcaagacatttgcccgcagcagcctgtgtgcgctcagcatgacaataatgaccgctcacgccgccgaaccgcctaccaatttagataaaccggaagggcgactggatattatcgcctggccgggatacatcgaacgcggacaaactgataaacaatacgactgggtaacgcagttcgaaaaagagacaggctgcgcggtgaatgtgaaaaccgccgcgacttccgatgaaatggtcagtctgatgaccaaagggggttacgatctggttacggcatccggcgatgccagcctgcgtttgattatgggtaaacgcgtgcagccgattaataccgcattgattcccaactggaaaacgctcgatccgcgcgtggttaaaggcgactggtttaatgttggcggcaaagtttacggcacaccttaccaatgggggccgaacctgctgatgtacaacactaaaaccttcccgacgccgccggatagctggcaagtggtttttgttgagcaaaatctgccggacggcaagagcaataaaggccgcgttcaggcttatgatggccctatctatattgcggacgctgcgttgttcgttaaagccactcagccgcagttgggcatcagcgatccgtatcaactcaccgaagaacagtaccaggcggtgctgaaagtgctgcgcgctcaacacagtttgatccatcgctactggcatgacactaccgtgcaaatgagcgatttcaaaaacgagggtgtggttgcttccagtgcctggccctatcaggccaacgccctgaaagccgaaggccagcctgttgctaccgttttcccgaaggagggtgttaccggttgggctgataccaccatgctgcatagcgaagcgaaacatccggtttgcgcctacaaatggatgaactggagtttaacgccaaaagtgcagggcgatgtggcggcctggtttggcagcttaccggtagtgccggaagggtgtaaagccagtccgttattaggcgaaaaaggttgtgaaaccaacggttttaactatttcgacaaaatcgccttctggaaaacgcctatagcagaagggggcaagtttgttccctacagtcgctggacgcaggattacattgccattatgggcggtcgctaacttcgctggggtgctttatgacgtacgcagtggagtttgacaacgtcagccggttgtacggtgacgtgcgcgcagtagatggcgtcagtattgcgataaaagatggtgagttcttctctatgctggggccgtccggctccggcaaaaccacctgcctgcgcctgattgctggcttcgaacagctttccggcggggctatctctatctttggtaaacccgccagcaatctgccaccgtgggagcgggacgtgaatactgtctttcaggactacgcgctatttccgcatatgagcattcttgacaatgtcgcctatgggctgatggtcaaaggcgtgaataaaaagcagcggcacgcaatggcgcaagaggcgctggagaaagtggcgttggggtttgtacatcaacgtaaaccgagtcaactttctggtggtcagcgccagcgggttgctatcgccagagcattggtgaatgaaccgcgcgtattgctgttggatgaaccgctcggcgcactggatctcaaattgcgtgagcagatgcagctggaactgaaaaaactgcaacagtctctcggtatcacttttatcttcgttacccacgatcagggcgaagcgttaagcatgtccgatcgtgtggcggttttcaataatggacgcattgagcaggtcgattccccgcgcgatctctatatgcgcccgcgcacgccgtttgttgccgggttcgttggtacaagcaatgtttttgatggactgatggcagagaaactttgtggcatgacgggaagcttcgccctgcgaccggaacatatccgcctcaacacccctggtgaactgcaggccaatggcacgatccaggcggtgcaatatcagggcgcggcaactcgttttgaactgaaattgaacggcggtgaaaaactgcttgtgagtcaggccaatatgacaggcgaagaactgcctgccacgctcacgcccggacaacaggtgatggtttcctggagccgtgatgtgatggtgccgctggttgaggagaggtgaatggcgatgaatgtattgcaaagtcctagtcgtccaggtctgggtaaggtgtccggtttcttctggcataatccggggctggggctgtttttactgctgcttggcccgctaatgtggtttggcattgtctatttcggcagcctgctgacactgttatggcagggattttatacttttgacgatttcaccatgagcgtaacgccggaactgacgctggcgaatatccgtgcgctgtttaatccggcgaattacgacatcattctccgcacgctgactatggctgtggcagtcactatcgccagcgccattctggcttttccaatggcgtggtatatggcgcgctataccagcgggaaaatgaaagcgtttttttatattgcggtaatgttgccgatgtgggcgagctacattgttaaagcctatgcctggacgttattgctggcaaaagatggcgtggctcagtggtttttacaacatcttgggctggaaccactgctgactgcgttccttacattacctgcggtgggcggaaatacgctgagtacttccgggctggggcgctttctggtgtttctctatatctggttgccgttcatgatcctgcccgttcaggcggcgcttgagcgtttgccgccgagtttgttgcaggcgagcgctgatctcggcgcacgtccacgacaaacctttcgctatgtggtgctgccgctggcaatcccgggtattgccgctggctctatctttaccttcagtctcacactgggcgattttatcgtcccgcagctggttggtcctccaggatattttatcggcaatatggtttattcccagcagggggcgattggcaatatgccgatggcggcggcattcaccctggtgccgattattctcatcgcactgtacctggcgttcgtgaaacgtctgggagcgttcgatgcactctgaacgcgcaccgtttttcctcaaactggcggcctggggcggcgttgttttcctacattttcccatcctgataatcgccgcctatgcgtttaacactgaagatgcggcgtttagttttccaccgcagggcctgacgctgcgctggtttagcgtggcagcacagcgtagtgatattcttgatgccgtgacactgagtcttaaagtggcggcgctggcgacattaattgcgctggtgttagggacgctggcagctgccgcgctgtggcgacgagactttttcggcaaaaacgccattagcctgttactgctgctgcccattgcgctgccgggcattgtcactggtctggcgttattaaccgcctttaaaaccatcaatctggagccgggatttttcaccatcgtggtcggtcatgcgactttttgtgtagttgtggtgtttaacaatgtcatcgcccgttttcgccgcacctcctggagtctggttgaggcgagtatggatcttggggccaatggctggcaaaccttccgctacgtagtgttgccgaatctcagtagcgcgttactggcaggaggaatgctggcgtttgccttgagcttcgatgaaatcatcgttacgacctttacggcaggtcatgaacgaacgttaccgttgtggttgctcaatcagcttgggcgaccgcgtgatgtaccggtaactaacgtggtggcactgctggttatgttggtaacaaccttgccgatcctgggggcctggtggctaacccgcgaaggcgacaatggtcaataaccactgatacaggaatatgctatgcaacataagttactgattaacggagaactggttagcggcgaaggggaaaaacagcctgtctataatccggcaacgggggacgttttactggaaattgccgaggcatccgcagagcaggtcgatgctgctgtgcgcgcggcagatgcagcatttgccgaatgggggcaaaccacgccgaaagtgcgtgcggaatgtctgctgaaactggctgatgttatcgaagaaaatggtcaggtttttgccgaactggagtcccgtaattgtggcaaaccgctgcatagtgcgttcaatgatgaaatcccggcgattgtcgatgtttttcgctttttcgcgggtgcggcgcgctgtctgaatggtctggcggcaggtgaatatcttgaaggtcatactagcatgatccgtcgcgatccgttgggggtcgtggcttctatcgcaccgtggaattatccgctgatgatggccgcgtggaaacttgctccggcgctggcggcagggaactgcgtagtgcttaaaccaagtgaaattaccccgctgaccgcgttgaagttggcagagctggcgaaagatatcttcccggcaggcgtgattaacatactgtttggcagaggcaaaacggtgggtgatccgctgaccggtcatcccaaagtgcggatggtgagcctgacgggctctatcgccaccggcgagcacatcatcagccataccgcgagctccattaagcgtactcatatggaacttggtggcaaagcgccagtgattgtttttgatgatgcggatattgaagcagtggtcgaaggtgtacgtacatttggctattacaatgctggacaggattgtactgcggcttgtcggatctacgcgcaaaaaggcatttacgatacgctggtggaaaaactgggtgctgcggtggcaacgttaaaatctggtgcgccagatgacgagtctacggagcttggacctttaagcagcctggcgcatctcgaacgcgtcggcaaggcagtagaagaggcgaaagcgacagggcacatcaaagtgatcactggcggtgaaaagcgcaagggtaatggctattactatgcgccgacgctgctggctggcgcattacaggacgatgccatcgtgcaaaaagaggtatttggtccagtagtgagtgttacgcccttcgacaacgaagaacaggtggtgaactgggcgaatgacagccagtacggacttgcatctagcgtatggacgaaagatgtgggcagggcgcatcgcgtcagcgcacggctgcaatatggttgtacctgggtcaatacccatttcatgctggtaagtgaaatgccgcacggtgggcagaaactttctggttacggcaaggatatgagtctttatgggctggaggattacaccgtcgtccgccacgtcatggttaaacattaaggataatattgcagatcgtaagagtatgagatgatcttgcgtactgtcagagcactgatttctctgacagtacgtgctgcgtgcaaaatcactacatcaaataaaccagccaaatctcatagagataagagtaaacaaaccaacagcagcaaagaaatttatcagtactacagttctactggaaacattcatttttgccaccttttatcattgcccctatgtgtatagtacgggttaagaaaatccgcaataatactcattctgaagatggataagggcaagttgctgtttgatgattttttctcaaactggtgaaaaaacttgatgcacgtcaaaaaatgacgcatatttgcgcgcgttttattcatctggctggacgcccgtacatgtctctctatcaacacatgcttgttttttatgcggttatggcagcaatcgcatttcttatcacctggtttctttctcacgataagaaacgcatccgtttcttaagcgcctttctggtgggggcaacatggccgatgagtttcccggtggcgctgttgtttagtctgttttaaatcttactcactggcttgacggcaccacgcagacttatatcatttggatgaatcgataaatttcacaagtggctaaggagaaagtatgagccatctggatgaagtcatcgcgcgcgtggatgccgcgattgaagagagcgtcattgcccatatgaacgaattattaatcgccctgagcgatgacgcggagttaagtcgggaagatcgctacacccagcagcaacgtctgcgcacagcgatcgcccatcacggtcgcaagcataaagaagatatggaagcgcgccacgaacagttaaccaaaggcggcaccatcctctgattaaaaactgcgtctggctaccaaccaggcgccaaccacaagtaaaattgcgccacaaattgggccgaacaacgcccgtagtggtacgccatgactgcggaagatatccagcatcagaccgccaatcagctgactggcgaccagtacagcaatagttgtcgccgctcccacattctgatatccgctgatactggcgaagacaaaaaagcttcccagcaagccaggtataagtgtccaccagcgcacgctggacaccagttcgccaaaccccgccatgccttgtttaaaccataaaatagaaacaaagagcacaatccccaccagactgttcagcaacatggcgatgagaatggtagaggaggtctgggtgatgcgcaccatcagcgtgttctggacaaccagaccaattccggcggcaatcaaaaaagcaagggtgaggctctgattcatccaatcgcgtccggttcagtgcgctcgtcgagttgcaactgcataaatgtcagatccagccaacgaccaaatttagtgcctacctgcggcatttgcgcggtgacgacaaatcccaggctctggtggagatgcaggctggcctgattttggctttcgatcccggcgaccatgacatgcttcccgcaatcccgcgcttcatcaatcaatcggcttaacaatttacgccccagacctttgccctgatgatcgggatggacataaacgctatgttccacggtatggcgaaaaccatcgaaactacgccagtcgccaaagctggcatatcccgtcactacgccgttttcctcgctcaccagcactggataacctgctaaagtccgcgcttcaaaccaggcaatgcggttatcagcatccaccgtttggtcattccagatagccgccgtatacaacacggcgtggttataaatttccgcaatggcagcacagtcggctttgcgggcaaaacggatggacatgtctggcctcaataaaataatgatgatgatgttatcaatactatcgaaaacagcccgaagcaacggattcctcgatgaaattattgcgtgttgcagaggggatgtgacggctgcaaacaaaaccaatcccgtgagcctgctactattgatggattcatgccaaaagcacaggagagcattatggggcaacaaaagcagcgtaatcgacgttgggttctggccagccgtccacatggcgcacctgttccggagaatttccgtcttgaagaagatgatgtcgccacaccgggtgaaggacaggtgttactgcgcacagtttatttgtccctggacccgtatatgcgtggacgtatgagcgatgagccatcttatagtccgcctgttgatattggcggcgtgatggtcggcggtacggtgagccgtgtcgtggagagcaatcatcctgattatcagtctggcgactgggtgctgggctacagtggatggcaagactatgacatatccagtggtgatgatctggtgaaacttggcgatcatccgcaaaatccaagctggagcctgggtgtgctagggatgccaggctttaccgcttatatgggcctactggatatcggtcagcctaaagagggcgaaacgttggtggtagctgcggcgacaggaccagtgggggcgacggtggggcaaatcggcaaacttaaaggttgcagagtggtgggggtagccggtggcgcggaaaaatgccgccatgctaccgaggtgttaggcttcgatgtttgtcttgatcaccacgcggatgattttgccgaacaactggcgaaagcgtgcccaaaaggtattgatatctattatgaaaacgtgggcggtaaggtattcgatgcggtgctaccgttacttaatacatctgcgcgcattcccgtctgcggattagtgagcagctataacgctacagagctaccacccggtccggatcgtttacctctgttgatggctacagtgctgaaaaaacgtattcgcttgcaaggttttattatcgctcaggattatggtcaccgcatccatgagtttcagagggagatggggcaatgggtgaaagaggataaaatccactaccgcgaagaaattactgacggtttagagaatgcgccacagacgtttatcggcctgctgaagggtaaaaacttcggcaaagtggtgatccgcgtggcgggtgatgattaaagtttcaacggcggcgtaagccgccataaaaatccaggcaaaaagcttattttcagctttaattaactaaccacatcattgttctgctgctaataacaacaaaggtgagtggtttatgattattcactttaatacaccaggtgaattccttctgccatgcaggcagggttggacagaaaacacgcgaaggaattaaaatgcctggaacgggaaaaatgaaacatgtcagtttgactctgcaggttgagaacgacctgaaacatcagcttagtattggcgcattaaaacctggcgcacgcctgattactaaaaatctggcggagcaattaggtatgagtattacacctgtgcgtgaagcattattacgtctggttagcgtgaatgcgctttctgtcgcacctgcacaagcatttacagttccggaagtggggaaacgtcaattagacgaaatcaatcggatccgctacgaactggaattaatggcagttgctctggctgttgaaaacctcaccccgcaagaccttgcggaactccaggaattgctcgagaaattacagcaggcgcaagaaaagggcgacatggaacaaatcattaatgtaaacaggctatttcgcttagcgatttatcatcgcagtaatatgcccatcctgtgtgagatgattgagcaactgtgggtcaggatggggcctggtttacattatctctatgaagcgattaatccagcggaattacgggagcatatagaaaactatcatctgttactcgctgcgttaaaagcaaaagacaaagagggatgcagacattgtcttgctgaaattatgcaacaaaatattgctattttataccagcaatacaatcgttaaagtaaatgcccggcaaataccgggcatcaaggtaattactcaaatctccacgcaatattcatgccgacaccataatttcgtccggggctaggttcgtaatatcgcccgttactctcattgacaatgacagaaccaacgtattctttatcgaataaattatcgacacgaccaaataaatccacagttaaattgtggtaattgtatttatacccggtgaataagccgacgagagtataagacggcgcttttgccgtattttcatcatctgccataatatcgcccatataacgcgcttccgtgcctgcataccaaccatcttccggtacataacctatgctcgcaaagcccatattacgggcgatccctggcatccgattaccgttacaatcctgttcattgcaaacattgctgcgataggtcgcatcaagccaggtccaggacgcgtttacgcgaaaatctcctgcgaaacgttgatcccatgccagttcagcgccttgacgacgggtctttccggcatttttgtaagtcgtacgcccaccgctactgctatcgacaacaatttcatcatcagtgtcggtctgaaacaatgcgagactaagcagcccatcaccaatacgcgttttactgccgatctcaattgtatcgttggtggatggttttaaacctaagttcataccgctttgcccatcagcacgataagacagctcattaatcgtcggcgtttcaaaacctcgcccggctgccagatagatattccaggcatcggtcattgcatattttaagctaccggcaggtagccatttatgataactggcatcaccgctgtcatcgccgttacccggagtaacgtaatggtcgttggaatcaaaccacacggagctgtagcgcacgccagcatccaggctcagtttttcgctcagctgccactgcgtctgtaaatagggatcgatgttccacatcagattgcgttcgtcgcgacgcaactcacctttttgcccgtactccggcatgccgctattcaggcggaagttattgtagcccttgcggttttcactcatgttttcgtagttcaggccggtagtgaacgtgaccggaacgcccagttcaccacggtgtgtccagcggctgtctattccctggtaatggcgttgcagggtaatcacgccgcccgcatgactcgggttaagttgtggtgccatgggtatactctggtactgggtcgtttctcgctctccggcatacatcatcacactcatatcatcccggctactcaggctacgctcatagcgcaacccagcctgagtttgcttgatggtttttcgcgtgtcgtactgttctgcacgaggcgcttgttgtggattagccttccattctgctttggttagcccacctgggtcatctgctttgatatccacactattgaaaatcagacttaatttgctggcttcatcaatgcgtacgcccagtttggcattggctaaatttttctgtgcgccactatggtcacgatagccgtgggtcgtaaaacgcgtggtactgacggtgtaatcgacatcgccaggctgtgtgccgtctcccgttgcgcccgttgctttcagcccatagcgccagctgccaaaactgccgtagtaactactggcttcaatggttggtggctgttgtccggtctgggtggtgacattcattaccccaccagacgcgttgccatacagggcagagaaggggccacgcagcacttccacattttgcacactgcttaaatcgatgttggatgtttgcccttgcccgtcgggcatggtggcgggaataccgtccacatacaggcgaataccgcgaataccgtaagtggagcgggagccaaatccgcgaatgctcagctgtaaatcttgcgcatagttctgccggttttgtacctgcaaaccaggcacgccggtcagactttcggacaagttaatgcgcggtgttgccaggcgcatctcctcgccatccaccacgcttactgctgctggggtatccagttcactaaccacctgcggtgcggcactgacaatcatagtctgttcatcagcggcaaaaacaacgggggaaaggacaagcagtgcgggcaaaacggtctgtcggacggaaaaaatcttcatgaaaaaagccaggttaagaatgggaaaacgccgtcatggtaatgaaattgtaaatttatggaaaatgaaacggcacaatacgttaagtaattgagaaaattgtagtcgtaacggcaagaaatgctccacatttgagaaaataatgattaccattcccatttataacaagagcgtaacgatgattacgcttagcgaagcattgtgaagcagcaaaaatatcggttcatcaaagggagtcgtcatgcatttacgtcatctgtttagtagccgcctgcgtggtagtttactgttaggtagtttgcttgttgttagtagtttcagtacgcaggccgcagaagaaatgctgcgtaaagcggtaggtaaaggtgcctacgaaatggcttatagccagcaagaaaacgcgctgtggctcgccactagccaaagccgcaaactggataaaggtggcgtggtttatcgtcttgatccggtcactctggaagtgacgcaggcgatccataacgatctcaagccgtttggtgccaccatcaataacacgactcagacgttgtggtttggtaacaccgtaaacagcgcggtcacggcgatagatgccaaaacgggcgaagtgaaaggccgtctggtgctggatgatcgtaagcgcacggaagaggtgcgcccgctgcaaccgcgtgagctggtagctgacgatgccacgaacaccgtttacatcagtggtattggtaaagagagcgtgatttgggtcgttgatggcgggaatatcaaactgaaaaccgccatccagaacaccggtaaaatgagtaccggtctggcgctggatagcgaaggcaaacgtctttacaccactaacgctgacggcgaattgattaccatcgacaccgccgacaataaaatcctcagccgtaaaaagctgctggatgacggcaaagagcacttctttatcaacattagccttgataccgccaggcagcgtgcatttatcaccgattctaaagccgcagaagtgttagtggtcgatacccgtaatggcaatattctggcgaaggttgcggcaccggaaagtctggctgtgctgtttaaccccgcgcgtaatgaagcctacgtaacgcatcgtcaggcaggtaaagtcagtgtgattgacgcgaaaagctataaagtggtgaaaacgttcgatacgccgactcatccaaacagcctggcgctgtctgccgatggcaaaacgctgtatgtcagtgtgaaacaaaaatccactaaacagcaggaagctacccagccagacgatgtgattcgtattgcgctgtaatagatatggcgagggtgaaaacggtgagacttgcctgccttttatcacggcgtatccggcactttcgtcagtaatctgaatttgcccggcacgtagccgggcaattttgcaattaactcgccgtttcaggcttaaacacaatttcctgtttttcttcatcttcctcgacgactggcgcagtgctgtgaatttcagcaacgcgtttgcgcacaccaaaccagcctataaccagcaaaataccgataatcggcagcgccgcgatagtataagtcccgttcgggtaatcgaacgccatcagcacaaggacactcagtaaaaacagtaatgtcagccaggaagtgaagggcgcgccaggcagtttaaaactgacatccgctgctttgccttctttaatcgctttacgcaggcgcatctggcacacgatgataaacgcccaactagcgatgattcccaggctcgcgaagttcaacacaatctcaaatacgcggctcggcaccagatagttgaggaatacgccgacgacatacacaactagtgtcgccagaatcccggcatacggcacatgctgacgactcattttcgccataaaactcggtgcggaaccgcccatcgccatactgcgcagaatacgtccggtgcagtacagaccactattcaggctggagagggcagcggtcagcaccacaatgttcataatgctgccgatatatggcacacccagtttagagaaaaacgtcacgaacggactttgccccgcctgatacgcgctccacggcaataacataaccagcaacaccacggagccgacgtaaaacaggccaatacgccaaatcacactgttaatggctttaggcaccatggtctgcggatctttacattctccggcagctgtacccaccatttcaatggaggcaaaagcaaacactacgccctgaatcaacaccagcgcaggcagcaaaccgtgggggaagaagccgccattatcggtgattaaatgaaagccagtggtgttgccatccagcggctgaccactaccgaggaacactgtacccacgaccaaaaaggtcacaatggcgagcactttaataagcgcaaaccagaactccatctccgcaaaccatttcacaccgatcatattcatggtgccaacgatggtaagtgcagcgagcgcaaagacccactgcggcacgccgccaaacgcaccccagtaatgcatatacagagcgacggcggtaatatcaacaatccccgtcatcgcccagttgatgaagtacatccagccagcaacataagcggctttctcacccaaaaactcacgggcataagaaacaaaactgccactggaagggcggtgtagcaccagctcacccaatgcacgcagaataaaaaagctaaacaagccacaaattaaataaaccagtgccagtgcgggccccgccatttgcagtcgggctcctgcacctaaaaacaagccggtgccaatcgcgccgccaatggcgatcatctgcacctggcgattgcccatcgctttgtgatacccctcttcgtgggcattaagccagcggcgtttcgcggcgtgttgatcactagtgtcggtgtcgtgtttactcattgctctccctgattgctttaatgaaaaagtcatataagttgccatgaacaatgtttattcatcctggcgatgatagttatcaccattattctttatgggtataaaactatcggcgcagcatcctacccgttatcgataaacgatgcaaaacatccccttacaatcctgaaggggattaatacaactgacgaaaaaatgacaaatccttttgctggttaacctgtgtactgtcctacacttaatctttaaaagattgtgaggggcatatgattaaggtgtatggcgtacccggatggggctctacaatcagtgagctgatgctaacactggctgatattccttatcagttcgttgatgtcagtggttttgaccacgagggagctagtcgcgagttattgaaaaccctgaacccgttgtgtcaggttccgacactggcattggaaaatgacgagattatgacggagacagcggcgattgcattgatggttctcgatcgtcgcccggaccttgcgccaccggttgggcgcgccgaacgtcagctgtttcaacggctattggtctggctggttgctaatgtctatccaacattcactttcgccgattaccctgagcgttgggctcctgacgcacctgaacagttaaagaagaatgttattgaatatcgaaaaagcctttatatctggttgaatagccagctcactgctgaaccttatgcgtttggtgagcaactaacgctggtggactgttatctttgcactatgcgcacatgggggcctgggcatgaatggtttcaggataatgccacgaatatcagtgcgattgctgatgctgtatgtcagttaccgaaattacaagaagtattaaaaaggaatgaaattatttgagtgggataccagaagattatgttatttattattcagtaactttatccacaatgatgggcgtaattaattaaattcatggtatgttttttaatttatatcactctccttttcattcagcgtgtctatttcatttcctctgaaaagaaactaactattcacatcgtgcagatgtttcagttgttaagtcaggcattctataatctcaaaatgtttttaatgatggatatgctcggagttggagatgcaattaatattaatacaaataaaaatatccggcaggtatgctaaaaggataaatggcgttctctgtatttattcgcaattatctgtaggacaaatatggagagcttgatgagtcagagctaaaacagcaattgattaataaacatgttgatttattcaagaaaatggatgtattttaaatgttgattcttaatataacctaatcaatagattatcaagtgagagctacacattattggaggggcaggggaaaacaccattttgggaacaatgcatcaggtactcttaccactgaagcaagatcatccggcaccaggtggtggtgcagtgctttggaaatggtcccctcgggggagttgtcattattttctatgctatttgcttattatattcatcaggtgaatttaataaattcctaatttgaaatatccactattaagctagtgtttaacgacgttaagatggcaatgtgcagatcatgttatcagggtggggcggtagcgtatattccttatacaaaccatcattcatttcaatgattgttattgaattatttattgttgtgaataaaaagacattatgaatattggtttgactttgcatatcaggttttttattactcgctgtaatgtacgagcctgtcgtgaataacgtcgagaacccatccgttgcgtttgtgattattttgttgactaaacagacacccgtttctctgaagtaaaatcccagactaaatcatcacataaccatgacatttttctgatattccccggtaacgccagataacgatgccaaatttaccgttatgttcaatcaactccctggtccatgtcgatttatctaccacaatcgccacgcgtggaggttcaaactccaccggcattgaccaggctgcagccataatgttacgccgctgggattgctcatcgaaactggtgatcaagaccgttgggccatgatttaacagacggctggcatggtgtaattctatggggatgaatcggctcatggtatcgcctcgcgaagaaggtttttttaagcgtagtccgtaacgcaataagtaacgaaattaacgggattggcgatttgcgaacgtgatgcatgtccgcgatcgcacaaaatagccggtgcggcgtctattccaggttataagttgagaaaaccactaagggaaacgcctgatgacgcccattctgaatcactattttgcccgtattaactggagcggagctgctgcggtcaatattgatacgcttcgtgcattgcacctgaaacacaattgcaccattccgtttgaaaacctcgacgttttgctgccgagggaaatacagcttgataatcaaagcccggaagagaaactggtgatagcccgtcgtggcggttactgttttgagcagaatggcgtgtttgagcgggtgttacgcgagctggggtttaacgttcgcagcttgttagggcgcgtagtgttaagtaatccgccagcattaccgccgcgcacccatcgtttgctgttggtggaactggaagaggaaaaatggattgctgatgtcggtttcggtgggcagacgctaaccgcgccgattcgtttagtttccgatctcgtgcagaccacgccacacggagagtatcggttgttgcaggagggtgatgattgggtgttgcagtttaatcatcatcagcattggcagagcatgtaccgttttgatctctgcgagcagcaacaaagcgattatgtgatgggcaatttctggagcgcgcactggccgcagagccattttcgccatcatttgctgatgtgccgccatttgccggacggcggcaagctgacactgaccaattttcattttacccattatgaaaatgggcacgcggtggagcagcgaaatctaccggatgtggcgagtttatatgctgtgatgcaagaacagtttggtctgggcgtggatgatgcgaaacatggctttaccgtggatgagttagcgctggtgatggcggcgtttgatacgcacccggaggcgggaaaataatttatgtcaggttgccggatgcggcgtaaacgccttatccggcatacattagcccggttgtagacctgacaggcgaagcgcatcagacaacggtttcagagttcaattgcccattcggcatgaaacaaaatcaccgctgtgccactaatggtgactttttccggttggttatcacgaattgtcaccgtcacttcaatcataccgtcacgccccaatgcgcgcccctgatggcctttaacacgcaacacgttgccatcgtggggcaatacgttgtgatgtaccaaccatgcacccatcgggccattggcattgccagtcaccggatcttccacaataccaatcgcagggctgaacatgcgaccatcggtttcgtttttgcctgggcggatctggaacgggaagaaaccattgcagccaatctttttgctgatagcggtcagcgcattaaggtcagggctaagggcgtcgatatccacttccggtttcagtgggatcatcactttactgtgtcctgttgttgccacctgaattggcaagcctggcagaatatcgtcctcagtgagatgaagcgcgttgataatcgccgcacgtgtttcaccttccagcggtggctcaaagcccggcgtaccttgttccaggctaatacgataatcatcgttgtgcttttcgatagtcacgcgatgttttcctgccaggcttgtttgccagatcgtgcaatttcctaaacctaacaccttcgcacgtacatagtgcgcagctactgtcgcgtgaccgcaaatcggcacttcaaccgttggcgtaaagtagcggatgcgcacatcgctgtcgtcgctgtgcagcagaaaagcagtttcgctatggcctaactcgcgggcgataagctgcatttgcgcttcgctaagattatcggcggggaaaacaacaccggcagaattgccgcgaaacggttgactggtaaaagcatcgacgtggtacacctgcggtttcattaacgttctcctgtgactggagaactatcatagcctgcaagtggccggagagcgaagggctatccggccagggtgaaattatcgccggctacgcacaatttgatatcgacgagtaaagtactcaaacggcgcgctccacacatgcaccagtcgggtgaacgggaagagcaggaagatggtcattcccaacaccagatgcaggcggaagacgaacgctacgccgttgagcatctcactgcttccaccacggaaagtgacaatgctttgcgcccaacccaccagcttcatcatttcgctaccatcaggatactgtgcactaaacggtatggtacttagccccaacagacactggatcagcaaaatgctcatgatgatgatatccggcgtagtggaagtggcacgcacgcgctgatttgtcagcctgcgccacagcagtcctgcgccgccaatcaacgtcaacacaccgcaaataccgccgagcaccatcgccatgagttgtttcgctgccactggcaaaaaccacgcgtacatccagtgcggcgttaacatgccgaacaagtgcccgaagaaaatccccaaaatgccgatatggaacagattgctccatatcaccatcccgcgtttatcgagcatttgactactggaggcgcgccaggtgtactgcccgtagtcgtagcgcagccagctgccgaggaaaaacaccgtcgcacaaatgtacgggtagatatcgtaaaaaaagacgttcagatactgaatcatttcccacctcccgcactgatgtcgacatattgcggcgcgacatcctggctaaagcgtcgctgatattgattaagcgggctgctgtcacacgccgtggcgttatcttcaataaacttcacctgttcctcttcccacactgcatcaagcgcctggcgggtgtcatcgcgctcttcgctgtttacttgttttgtgacactgtcactactaagggagcttcccgccagttgcagcagagcatcaaacaacgcgtaccacggtgcctcgcgttgttttaagcgaccgccaagcagggcgaggatcggcgcaacattgagcaatccttctttcgcctgatcgtcaggcagtacgcttaaatactccagatacagcggtagataatcgggcagttcccgacaatccagctgcaggccgaccttttcatactccgccagcaggtccaccattgcctggccgcgatcgcgggactcggcatgaacatgttcgaacagcagcaggctcgtggtgcgcccgcggtcaaacacttcgcaccattcggcctgtttatccagcagcggcgcgttaagcaggttgtgggtgaaatccgtaagcatcggcgcgtcgcggcggatcaacgccagcgcgtcctccttgcattcccacaacagctcgtccggatactccatcaacaggccgatcactttgaggatctgcattattcgccctccgctttgtcgcgcacttcggtgatgttgatggcatcgatacggctactgttgaacaggttgaatttactgtcgctaccgtggcaaccgtcgccaaaggtaaaaccgcagccgttgcgttctgcgaaggcatcgcccgccatttcccgatggctggtcgggataacaaaacgatcttcatagttggcaatggcgagatagcgatacatctcttcgacctgggcgacgctcaggcctacttcgtcgatggcacgagtatcagtaacgccttccacggtttgactacgcatatagtggcgcatcgccatcatccgtttcagcgcccgcagtaccggaccggtatcgccggcactcaacatattggcgagatattgcaccggaatacgcaggctttcgatggcgggcagcacgccttcgcttttcggcaaaccgcccgcatctgcgtaggactgaatcggactcagcggaggaacgtaccagaccatcggcagggtgcggtattcagggtgcaacggtagtgccagtttccagtccatcgccattttgtagactgggctacgctgggcagcgtcaatcacattttgtggaataccttgtttcagggcttcctcgatcacactgggatcgtgtggatcgaggaacacttcgcactggcgttcatagaggtcaacttcgcgctcggtgctcgccgcttcctcgatgcggtcggcgtcgtaaagcagcacgcccagataccggatgcgacccacgcaggtttcactgcacacggtcggttgaccggactcaattcgtgggtaacagaagatgcatttttcactcttgccgcttttccagttgaagtagatttttttgtacggacaaccgcttatgcacaaacgccagccacggcatttatcctgatcaatcagcacaatgccgtcttcttcgcgtttgtagatagcgccgcttgggcaggtcgccacgcagctgggattgaggcagtgttcgcacaggcgcggcaggtacatcatgaaggtgttttcaaactgcccgtacatctccttttgcatggcctcgaagttgcggtcgcgggcacgtttttcgaactcaccgcccagcagttcttcccagtttggcccccagatcactttgtccatccgtttgccgtcaatcagactacgcgggcgagcagtaggaatatgtttgccttccggtgcgctatgcaaatgttcgtagtcgaaggtgaaaggttcgtagtaatcatcaatctgcggcaccaccgggttggcgaagattttggttattacgcccatcttgttgcccagacgcgggcgtatcttgccattcacatcacgcacccagccgccttgccactcttcctgatcttcccagtttttcggataaccaatgcccggtttggtttcgacgttgttaaaccatgcgtactccatgccttcgcgcccggtccagacgtttttacaggtcacgctacaggtatggcagccgatacatttgtcgaggttaagcaccatgccgacttgactacggattttcattttttcgcctcctgtacctgatcgcgaccttcatcatccagccagttaacgttcttcatcttgcggatcatgatgaactcatcgcggttgcttccgacggtgccgtagtagttaaagccccaggccagctgcgcgtaaccgccaatcatatgcgttggtttcgggcaaacgcgggtaacgctgttatgaatgccgccgcgcatgccagttacttcgctaccaggaatattcataatgcgttcctgggcgtgatacatcatggtcatgcccggcggtacacgttggctgaccaccgcgcgggcagtcagcgcgccgttggcgttgaatacttccacccagtcgttatcgacaatggtcagttctcgggcatctgtttcgctgatccagacaatcggtccaccgcgagagagcgtcagcattagcaggttttcactgtaggtactgtgaatgccccatttctggtgcggcgtcaggaagttaagtgctttttccgggaagccgtttggcggtatctggcgcatctcactgacgctacgggtgtcgataggcgggcgataagccaccaggctttcaccaaaagcacgcatccacggatgatcctgatagagctgctggcgtccgctcagcgtgcgccacggaattaactcatgaacgttggtgtatcccgcgttataggagacgtgatcgctttccagaccggaccaggtggggctggagataattttacgcggctgcgcctgagtatcgcgaaagcgaatcttctcgtcctctttgtgcagcgccagatgggtatgttcgcgcccggtgatctcgcccagcgcctgccacgctttgactgcaacatgaccgttggtttccggtgccagtgccagaatcacttcactagcgtcaatggcggtgtcaatcagcggacgcccctgtgccgggccatcacgcttggtgtaattgagtttgccgaggaaatcgatttcatcctgggtattccagctaatccctttaccgccattgccaagtttgtccatcaatggcccgaggctggtaaagcgttcatacgtagcagggtagtcgcgctccaccgccacaatattcggcgcggttttgcctggaatcagatcgcattcgcctttgcgccagtcgagcacttcacacggctgactgagctctgccggagagtcatgcagtaggggttgtaataccacgtcggtttctttgccaagatgacccacgcacacttggctaaatgctttggcgatacctttgtagatttcccagtcgctgcgactttcccacgccggatcgaccgccgcagaaagcggatgaataaacggatgcatatcgctggtgttcatatcgtctttttcgtaccaggtggcggtgggcagaacgatatcggagaacaggcaggtactggacatgcggaagtcgagcgtcaccagcaggtcgagcttgccttcaatcgctgcagtttgccactcgacttcttccggtttgatcccgtcgctggcaccgagttcctcgccctgaatcccgctttcggtccccagcagatacttctgcatatactcgtggcctttgccggaggagccaagcaggttagagcgccagacaaacaaattacgcggatgattgctgctgctatctggttgttcgcaggccatacgtaaatcgccgcttttcagcgcctgggcggtaaattctgtgggggataatccggccttgtcggcttcagctttaatcccgagcgggttacgccccagctgcggcgcagaaggtagccagcccatacgttcggcgcgaacgttgaaatcaatcagatgaccgctgtacttactggcatcggcgagcggactaagtaactcctgagcagagactttttcatagcgccattggctggaatgattgtagaaaaagctggtgctgttcatttggcgcggtggtcggttccagtcgagcgcaaaggccagtggcaaccagccggtttgtgggcgcagtttttcctggccgacatagtgtgcccagccgccaccgctttgcccgacacaaccgcagaagatcagcatattgatcatcccgcggtagttcatgtccatgtgataccagtggttaacacctgcgccgaggataatcatgctgcgcccatgcgttttatgggcggtatcggcaaattcacgggcgatggtttcaatatactggcgcggcacgccggtaatttgctcaccccaggctggggtgtacggtttgatttcagcgtaatctttcgcactgttttcatcttccagcccgcgatcgaggccgtaattcgccagtaccaaatcataaacgctgaccaccggacaggtgttgccatcgactaacgtcaggtttttaacgggcaattggcgcaccagcaccggattgtgttttacgctgcgaaaatgcggattttcaatgccgccaaagtaggggaaggccacgcctgcaacagcgtcatgttgaccgagcagggttaagctcaattcggtttccgtaccggcggcaatggattccagattccatttgcctttttctccccagcggaaaccaatgctaccgttcggcactaccaattcacctgcggtattaactgctacggttttccactgcggattgttgctttcgcccagtccatccaccaggtcagatgcgcggatcatgcgcccgggaacgtagctaccatcgtcgcgaggctccagcattaccagcatcggcatgtcgctgtagcggcggcagtagttgataaagtagtcgctgggattatcgagatgaaactcttttaaaatcacatggcccattgccatcgccagggcgctatcagtgccttgtttcggtgccagccactggtcgcacaatttggccacttcagagtagtcaggggtaatggcgatggttttagtgcctttgtagcgtacttcggtaaagaagtgggcgtccggcgtacgtgtctgcggtacgttagacccccaggcgatgatgtagctggagttataccagtcggcagattccggtacgtcggtttgctcgccccaggtcatcgggctggcgggcggcaggtcgcaataccagtcgtagaaacttaaacaggtgccgccaagcaggctcagataacgcgttccggcggcgtaagaaaccatgctcatcgccgggatcgggctgaaaccggcaacgcgatccgggccgtaggttttgatggtccagacgttagcggcggcaatcagctggtttagttcctgccagttggagcggataaacccgccgcgcccacgcacttgtttgtagctcaggcacttttgcggatcgttcataatgcttgcccacgccagtaccggatcgctgtgttgcttgagggcttcgcgccacagttcaatcagtcgtttacgaatgagcgggtatttcaggcggttagcgctgtaaagataccaggagtaacttgcgccacgcgggcagccgcgaggttcatgattgggcaggtcagggcgagtgcgcgggtagtcggtctgttggatttcccaggtcaccagaccatttttaacgtagattttccagctacaggagcctgtacagttaacaccgtgggtggaacgcacgattttgtcgaactgccaacgctggcgatagctgtcctcccagtcgcggttgctatgcatcacctgtccgtgaccatcggcaaaggtttcgcccttttgtttgaagtagcgaaagcgatccaaaagtttactcatgacatgactcctgctccaggaatgaattgggatctgatgccttgtcggatgcgacacggttgtacatcaggcatcgatctcttatttttggctgaacttccgccgaccataaaccagccaggtcagcagcacacaaacgatgtagaagattaaaaacactttcatcgcgccgaccggagagccggtcatattgaggctcatgccaaacgcctgcggaataaaaaagccgcccactgcgccaatggcactgataaagcccagagccgccgccgtttcggtgacggcttcttcatgagcttgctcatcactaccgcctttcatctttacccgataaatggttatctggcgaaagatgacggcgatcatctggaaagtagaaccacttcccagacccgcagtcagaaacagccccataaatacggcgtaaaaggcgatgaaattaccggagcctgtgcccggtaaggtaaggaacagcagggcactgaaaatcgccataaaaataaagttgatcaacgtcacccgcacgccgccgaacttatcggaaatagcaccaccaacgctccgcgcgatggcaccgataaatgggccaaagaacgccaggcgcagaatattcacatccgggaactgggtttttgccagcatggcaaaacccgcagaaaaaccgataaagctaccgaaggtggcaaggtaaagcaggctcagcagccagagatgcaggcgttgtaagacagggagctggtcggcaatactggcgcgactactggcgatatcattcatcccactccatgcggcgatcgtggcaatcgccagtagcggtacccaaatccatgcggcattcgccaggctcatcacgctaccgtcggcctgcggtacgccattgacgccgagaaaggcaaatacaggtacaaaaatgaccagcggtgcaaccagctgcattacacttacacctaagtttcctaatccgccattaatcccaagagcgctcccttgtttggcttttggaaagaagaaactgatattgcccatgctgctagcaaagtttgcacctgcaaaaccgcatagcaaagcgataacgataaatatcccaaaaggagtattcggattttgcacggcaattccgagccagacgcaaggaataatcaggattgcagtactaaaaaccgtccatcggcgtccaccgaatataggcaccataaaggagtagggaacacgcaataatgcgccagaaacggagggtaatgcggttaataaaaagagttgatcggtagtaaaattaaaaccgattttattgagattaacggtaactgcgctaaatagcatccagacacagaaggcaagaagtagacaactgacacttatccagagatttcttcgagcaatatgttttcctttattttcccagaaggccggattttctggtttccagtcgcgcaaaagataacgactatttttctcattttgcagtgccatattgttcctcacatgcacacattggtaatgaaaaaaagacaaaacacgaggtaaggcgcaatagccagttattagaattaaggatgaattgggtgaagtgctgattgaaagaatagataagaaagcgtaaccgcgggggcagaatggggattaagtagccagatatgtgttactaaatgtaactaacaagctaaccttcaaacggggttaatctttgaacgtatgtcatgtttcaacccttcagatcgtgaatctaaagggttacatattaactatattatcaacaagaccagacacttatagaattagtgatgatttattcattaaaaaggccaactactggaggaaaagcttctgtccagaaggtctatcggttcctctcttattgcctgattgtaataatcgttattacagtaagtattgtttatttcatctaaggtcatgtttttaacttttatattcatctggtttacaacttcctctgtcttgtaagtgtgtatattatatggggtatatgcttttttaataggatagtgaaacaattcgttatccacatctattccgtcagagtgaacttcaaatgcaccagggctaagaattgccaggccagtattaagcttaagtgctggggaaaacaaattaaataacatgagctgcatagtagggcaattgttcttcccagaaacatttaaaaaatttaagttttgctctgttttattatggggaataaagttccaatatcggatgtattattagtatcaatgtgggttattttattattgtccagtcttaaacttttgatagatggaagataagtcaggaaatcaagatttatatatttcaactggttgttagcagcgtttaatgtctgaacattgcagaagttgctatagaatattttaatttcagaaagcaaattgttgttaataagtaacgtattcaagttgggaaataagtcattgtgtaaacttgttagtttattatgggatagatccagcagtaagagttcatttttattacctgcaacaatatcagttaattgattatggctgagattcaggtattgcagccattcgcaagattctaattgcacaaactctagttgattatgtgccgcactaaaataagtaacactactaagcctatctatatcaatatttctgagagcattattattcatagatatatgtgtaatacttacatttctgccttgaggaaaatttatactctcaagagcattactattcagacttagctttacgagtctatcgtagttggttgcatcaaaatgtgtgaattggttattatcaagattgatagatgtgaagttttgcagccctggtggttgagtggttaaattaagtccacttaaatcaatggtcacttcattagtgtcatcaattatatttcttactgcagtccagtactgcatttgtgcaagtggatcattgttgatgccgttaactaatacatgccaaagatgtttactacttattagttgatcaatgtcattggttggcagtaaattgttattgcttaagtttaaatattccagttttgtagtgtttttggcgtttaaatgtgcaatatggttgtcgtttaaagtgattgttttcatcctgggatgattgtgtaatataaggtcagtgatcatattgtgatgggcacttaactcaatcagagattcttgccgcggctgccgttggcttcatcgttatagcctttaaaatcatattcccagtgaccaaaaccaatcatttgatcattgatttgcgtttctcctttaaagccgagacgggcataagttttatcaccatcgtcacgcttatcatcagtaaaataacgtagagcggtaaccttgccataaaggtcgagtttattaccatccttgttatagacttcggcagcgtgtgctacgttcgcagctaacaaaccagttacaaccaccgcaactatttttaatttcatttaacagaatccttttaattatcgttaaacgtattttctaaacgaattttaaacggcgtcatttataaatgacatactgtttttaaaatagaatggtgattaaaaacaatgagaaaaatagatgaaataatattatttatcgatatgtgatcgaagtcgaaatgagatataaggtgaattactggtatttgaaatttatttttttaatattgtcggaatttatctgattaactaccgggccgtagacccggcagttattttaaccacgacgtgtcgccagccagcagagcagggaaccgccgcagaccatcagcgcgccttgccagaagctgaagctcagcggggcgctgagcagcacggctgcaagcgcactggaaagtacaggcgtaaaatagctacctaccgccataatggtgacattgccatgcaatataccgacattccatgcagcataagcaaatcctaaggtaaatgccgcagagatgagtttaatcatgacgggcgtgctaaatatcatttctggttgtggcgtaagaaaatagtaaacccacagacttgctcccgttagcaggacaaaaacggtaattccattaaatccgcgtgcgtatttattcgttactgtgcaataggctgcccagataaacgcaccaatgaacgccaggaaataactcaatgggctggtggtgatattattgatgatttcatcataatgtaacccattgtcaccgcctaacacccaacagacgccgacgagggctaataataatccaggtacaatcaaccagttggttttctgaccattaaacagaatggcaaagagaattgtcaggctgggccacagatagttcaccatacccacttcaatcgcctgatgatgggtcgccgcataccctaaggaaagcgccagacagatttcatagctgacgaataacagactcccggcgagtaaatagcctttcgggatttgccgaatacgcggaaatccaaccgtgaagattaacagcagcccgcttaaactatagatagcagctgcgccgccgaccgggccgagcccctcactgacaccgcgaatcaatcctaccatcgtgctccacaggacgatcgctatcagccctatgagcgttgctttttgtcgtgtcatgctcgctgttttgtctctcttgccgttaaaaattaagctgaattttatagcatttttttaactggcctgtcaggcagtggtgcgtttttctaccgctattgaggtaggtcaatttgcgaaggcggattattttgtggcaaacagatgttctttttgatttcgcgcaaaaagattcagaattttactgttagtttcctcgcgcagtaatacccctgaaaaaagaggaaagcaatggacgtcagtcgcagacaattttttaaaatctgcgcgggcggtatggctggaacaacagtagcggcattgggctttgccccgaagcaagcactggctcaggcgcgaaactacaaattattacgcgctaaagagatccgtaacacctgcacatactgttccgtaggttgcgggctattgatgtatagcctgggtgatggcgcaaaaaacgccagagaagcgatttatcacattgaaggtgacccggatcatccggtaagccgtggtgcgctgtgcccgaaaggggccggtttgctggattacgtcaacagtgaaaaccgtctgcgctacccggaatatcgtgcgccaggttctgacaaatggcagcgcattagctgggaagaagcattctcccgtattgcgaagctgatgaaagctgaccgtgacgctaactttattgaaaagaacgagcagggcgtaacggtaaaccgttggctttctaccggtatgctgtgtgcctccggtgccagcaacgaaaccgggatgctgacccagaaatttgcccgctccctcgggatgctggcggtagacaaccaggcgcgcgtctgacacggaccaacggtagcaagtcttgctccaacatttggtcgcggtgcgatgaccaaccactgggtggatatcaaaaacgctaacgtcgtgatggtgatgggcggtaacgctgctgaagcgcatcccgtcggtttccgctgggcgatggaagcgaaaaacaacaacgacgcaaccttgatcgttgtcgatccccgttttacgcgtaccgcttctgtggcggatatttacgcgcctattcgttccggtacggacattacgttcctgtctggcgttttgcgctacctgatcgaaaacaacaaaatcaacgccgaatacgttaagcattacaccaacgccagcctgctggtgcgtgatgattttgctttcgaagacggtctgttcagcggctacgacgctgaaaaacgtcaatacgataaaagctcctggaactatcagctcgatgaaaacggctatgcgaaacgcgatgaaacactgactcatccgcgctgtgtgtggaacctgctgaaagagcacgtttcccgctacacgccggacgtcgttgaaaacatctgcggtacgccaaaagccgacttcctgaaagtgtgtgaagtgctggcctccaccagcgcaccggatcgcacaaccaccttcctgtacgcgctgggctggacgcagcacactgtgggtgcgcagaacatccgtactatggcgatgatccagttgctgctcggtaacatgggtatggccggtggcggcgtgaacgcattgcgtggtcactccaacattcagggcttgactgacttaggcctgctctctaccagcctgccaggttatctgacgctgccgagtgaaaaacaggttgatttgcagagctatctggaagcgaacacgccgaaagcgacgctggctgatcaggtgaactactggagcaactatccgaagttcttcgttagcctgatgaaatctttctatggcgatgccgcgcagaaagagaacaactggggctatgactggctgccgaagtgggaccagacctacgacgtcatcaagtatttcaacatgatggatgaaggcaaagtcaccggttatttctgccagggctttaacccggttgcgtccttcccggacaaaaacaaagtggtgagctgcctgagcaagctgaagtacatggtggttatcgatccgctggtgactgaaacctctaccttctggcagaaccacggtgagagcaacgatgtcgatccggcgtctattcagactgaagtattccgtctgcctagcacctgctttgctgaagaagatggttctatcgctaactccggtcgctggttgcagtggcactggaaaggtcaggacgcgccgggcgaagcgcgtaacgacggtgaaattctggcgggtatctaccatcatctgcgcgagctgtaccagtccgaaggtggtaaaggcgtagaaccgctgatgaagatgagctggaactacaagcagccgcacgaaccgcaatctgacgaagtggctaaagagaacaacggctacgcgctggaagatctctatgacgctaatggcgtgcttattgcgaagaaaggtcagttgctgagtagctttgcgcatctgcgtgatgacggtacaaccgcatcttcttgctggatctacaccggtagctggacagagcagggcaaccagatggctaaccgcgataactccgacccgtccggtctggggaatacgctgggatgggcctgggcgtggccgctcaaccgtcgcgtgctgtacaaccgtgctagcgcggatatcaacggtaaaccgtgggatccgaaacggatgctgatccagtggaacggcagcaagtggacgggtaacgatattcctgacttcggcaatgccgcaccgggtacgccaaccgggccgtttatcatgcagccggaagggatgggacgcctgtttgccatcaacaaaatggcggaaggtccgttcccggaacactacgagccgattgaaacgccgctgggcactaacccgctgcatccgaacgtggtgtctaacccggttgttcgtctgtatgaacaagacgcgctgcggatgggtaaaaaagagcagttcccgtatgtgggtacgacctatcgtctgaccgagcacttccacacctggaccaagcacgcattgctcaacgcaattgctcagccggaacagtttgtggaaatcagcgaaacgctggcggcggcgaaaggcattaataatggcgatcgtgtcactgtctccagcaagcgtggctttatccgcgcggtggctgtggtaacgcgtcgtctgaaaccgctgaatgtaaatggtcagcaggttgaaacggtgggtattccaatccactggggctttgagggtgtcgcgcgtaaaggttatatcgctaacactctgacgccgaatgtcggtgatgcaaacagccaaacgccggaatataaagcgttcttagtcaacatcgagaaggcgtaagggggcgaacagatggctatggaaacgcaggacattatcaaaaggtccgcaactaactccatcacgccgccttctcaggtgcgtgattacaaagcagaagtcgcaaaacttatcgacgtttccacctgtatcggctgtaaagcctgtcaggtggcgtgtagcgagtggaacgacatccgtgatgaagtggggcactgcgtcggggtttacgataaccccgccgatctgagcgccaagtcctggacggtgatgcgctttagcgaaaccgaacagaacggcaagctggagtggctgatccgtaaagacggctgtatgcactgtgaagatcccggctgcctgaaggcgtgcccgtctgctggtgcaatcattcagtacgctaacgggattgtcgatttccagagcgaaaactgcatcggctgtggttactgcattgccgggtgtccgtttaatattccgcgcctcaacaaagaggataaccgggtatataaatgcacgctctgcgtcgatcgcgtcagcgtcggccaggaaccggcttgtgtgaaaacctgtccgaccggggctatccacttcggcaccaagaaggagatgctggagctggcggaacagcgcgtggcgaaactgaaagcgcgtggttacgaacatgctggcgtctacaacccggaaggggtcggtggtacgcacgttatgtacgtgctgcatcacgccgatcagccggagctgtatcacggtctgccgaaagatccgaagatcgacaccagcgtaagcctgtggaaaggcgcgttgaaaccgctggcagcggctggctttattgccacttttgccgggttgattttccactacatcggtattggcccgaataaggaagtggacgatgacgaggaggatcatcatgagtaagagcaaaatgattgtgcgcaccaaatttattgatcgcgcctgtcactggaccgtggtgatttgcttcttcctggtggcgctgtccgggattagcttcttcttcccgacgctgcaatggctgacgcaaaccttcggtacgccgcagatgggacgcattttgcacccgttcttcggcattgcgattttcgtcgcactgatgtttatgtttgtgcgttttgtgcatcacaacatcccggataagaaagatattccgtggctgttgaacattgtcgaagtattgaaaggcaatgagcataaagtggcggatgtcggtaagtacaacgccgggcaaaagatgatgttctggagcatcatgagcatgattttcgtgctgctggtgaccggggtgattatctggcgtccgtactttgcgcagtacttcccgatgcaggttgttcgctacagcctgctgatccacgcggctgcgggtatcatcctgatccacgccatcctgatccatatgtatatggcattttgggtgaaaggaagcattaaagggatgatcgaagggaaggtaagtcgtcgctgggcgaagaaacaccatccgcgctggtatcgtgaaatcgagaaggcagaagcgaaaaaagagagtgaagaagggatataatctcttttgaactttaagctgaaaatggcgctgtaaaaggcgccattttcatattgtagacaacgtaggctttgttcatgccggatgcggcgtgaacgccttatccggcatgaaaacccttcaaatccaatagattgcagtgaacgtgtaggcctgataagcgtagcgcatcaggcaatgttgcgtttgtcatcagtttcaaatggcgctgtaaaaggcgtcattttcatattgtagacaacgtaggctttgttcatgccggatgcggcgtgaacgccttatccggcatgaaaacccttcaaatccaatagattgcagtgaacgtgtaggcctgataagcgtagcgcatcaggcaatgttgcgtttgtcatcagttctaaatggcgctttataaagtgccatttttttattgcgtaaccagacggcgtaatcggctcacatccactgttttttctgcctctgccagactccaggcgttttgcagattcagccacatttgcgggctactgccgatcaccacggaaagtttaatcgccatttctggcgtcaaagctgcttttcctgtcagcaatcggcttgccgtactgggagcaatttccattgctctggcaaactcgcgcagactgacattaagttcgtccagactttcctgaataatgtcccccgggcggggatgattggccattttcattagtgtctttactctcagtagcgttccttcactgggaacactatcattattgttccttcctacgcaacaataatccatttagccatttcatgttggagagtgtgcgatgctgcgacccgaacatggcagtcgcagcaaaggcctcttagtgacggaaatcaatcaccatgcggccacggattttgccttcttccatctcagtaaagatggtgttgatgtccgctaacggacgcagggcgactttcggcaccactttaccttcggcggcaaactggaaggcttcagttaaatcctggcgcgtgccgaccaggctaccgaccacttcaataccatccagcacaagacgtgggatatccaggctcatagactccggcggtagaccgacagccacaacacgaccgcctgcacggacagcatcaactgcgctgttaaacgcagctttagctaccgctgttaccaccgcagcgtgagcgccaccagttttctcctgcacaattttggcggcgtcttcggtgtgactgttaatcgctaaatctgcgcccatttcggttgccagttttaactgctcatcattgacatcaatggcgatcactttggcgttaaagacattcttcgcgtattgcagggcgaggttacccagaccgccaagaccgtagatagcaatccactgccctggacgaattttactcagcttaacggctttgtaggtggtgactcccgcacaggtaatgctgctggccgccgcgctgtccagaccatctggcacttttaccgcgtaatcggcgaccacgatgcactcttccgccatcccgccatcaacgctgtatccggcatttttaacactacggcagagcgtttcgttaccactgttacagtattcgcaatgaccgcatccttcgtagaaccacgccacgctggcacgatcgcctggttttaaactggtgacacctggacccacttctgccaccacaccgatgccttcatggcccagaattacgccggttttgtcaccaaaatcgccattcttaacatgaagatcggtatgacatacaccacaacactccattttcagcagggcttcgccatgtttcagactgcgcagtgttttatacgtaacgtcaacatgatgatccttcgtaacaactgcagccttcatagttcctccttttcggatgatgttctgcatagcaggtgaggcaaatgagatttattcgccactacccagtatggatgagatctgaaaaagggagagggaaatagcccggtagccttcactaccgggcgcaggcttagatggaggtacggcggtagtcgcggtattcggcttgccagaaattatcgtcaatggcctgttgcagggcttcggcagaggttttcaccgccacgccttgctgctgcgccattttgccaaccgcaaacgcaattgcgcgggagactttctgaatatctttcagttccggcagtaccataccttcgccgttcagcaccaatggactatactgcgccagcgtttcacttgcgctcatcagcatctcatcggtgatacgactcgcgccggaagcaataacacccaggccgatgcccgggaaaataaaggcgttgttacactgggcgatagggtagattttatctttccataccactggattaaacgggctgcccgtggcgaccagcgcgttaccttcggtccaggcgataatgtcctgcggtgtggcttccacgcgactcgtcgggttagacagcggcatcacgatcggacgcggacagtgtttatgcatctcacggatgatctcttccgtaaacagcccggtctgtccactgacgccaatcagaatatctggttttacattgcgcaccacatccagcagactcagcacatcgctgtcggtatcccagtcactgaggttttcgcgcttctgcaccagtttggtctggaaaggcagcaggttcggcatcttgtcagtcagcaagccaaagcgatcgaccataaagactttctgccgcgccgcttcctcgcttaatccttcgcgctgggtctgggagatgatcatttcggcaatgccgcatcccgcactacctgcgccaaggaagacgatttttttctcgcttaactgaccacctgccgcgcggcttgctgcgatcagtgtgccgactgttaccgccgcagtgccctgaatgtcatcgttaaaagaacaaatttcattgcgatagcggttaagtaacggcatcgcatttttttgagcaaagtcttcaaactgcaacagcacgtctggccagcgttgtttcacagcctggataaattcatcaacgaattcatagtattcgtcgtcagtgatacgcggattacgccagcccatatacagcggatcgttaagcagctgttggttgttcgttccgacatccagcaccaccggaagggtatacgccgggctgatgccgccacaggcggtatagaggctcagtttaccgatcggaatgcccatcccgccgatgccctggtcaccaagccccagaatgcgttcaccgtcagtcaccacaatcactttaatattatggttcggcacgttttgcagaatatcgtccatattgtgccggttctggtaagagataaacacgccgcgactacggcggtagatctcagaaaaacgctcacaggctgcgccgacggttggggtataaataacaggcatcatctcatcaagatgattgtttaccagacggtagaagagggtttcgttagtgtcctggatgttacgcaggtagatgtgtttgtcgatttcggttttgaatccctgatactggatccatgctcgttccgcttgttcttcgatggtttcgaccacttccggcagtaaccccagcaggttgaagttacggcgttcttccatgctgaaggcactgcctttattcaacaacggaaattccagcagtacagggccagcgtaagggatataaaggctacgctgtttttttgtttttggttccatgtcactcactcttttttgaatatccatccctggggggcttttatcgtctttgctttaccgccagggcgtcggcctcaagtataaagcagataaaaacaaaaacaccattgcgcaggcaatggtgtttaatcgtcattgaggactgatggttatgaattacttttcagcggggcgttttctgccggttgggttatttactacgctggatttgtcaccttcggtaactattttgcgctggttagaaattttatggtccagtccaagaatatgacgtgcctgacggttgcttttcattttaactcctcaatcctgtagctagttttaaggacaacatcgccgtagcgaagaaacacgtgctaaacccctaaattaggttgccgatcaagcatagcaccttaaagcgtagggtgctggccactgaccacataattgatcgtttgctggtagatatcactgaggatgtcgttatcagaagcttcaacccatttggtcagctccatgagaatgtcatcttcagtgacaacaccatgctgtgcccgaaggccttgctcaatggcattaaccagagcgggttctgctgtactattttctgcctgataataagtaaacatagtgattctccgtgtctgtgtatttatggtgtctgctacggatcgcagatttataaagcacattcagcatggcaaatatttgccgcttcgttgttaagattagtcctggttgatgatttttatattttaacaccatgatattcatagggattgtgattggtatgatccgattaatattgatacaatatcttttgggttatatattcccggtaatctattgtgggaatttaatttaagtgcagaagtaatattttcgccggattttattcggaatatcctgcttatcctcgtgctgtttctcacgtagtctataatttcctttttaagcccacaggagagcaacaatgacaatccataagaaaggtcaggcacactgggaaggcgatatcaaacgcgggaagggaacagtatccaccgagagtggcgtgctgaaccaacagccgtatggatttaacacgcgttttgaaggcgaaaaaggaaccaaccctgaagaactgattggcgcagcgcatgccgcatgtttcagtatggcgcttagtttaatgctgggggaagcgggattcacgccaacaagcattgataccaccgccgatgtgagcctggataaagtggatgccggttttgcgattacgaaaatcgcactgaagagtgaagttgcggtgccgggtattgatgcctctacctttgacggcataatccagaaagcaaaagcaggatgcccggtctctcaggtactgaaagcggaaattacgctggattaccagttgaaaagctaaagcattgccggatgacgcgtcaggcgcgtgaatgcctgatgcgttgttagcatctttacagcgcccgccagcaccggagctcacgtccgtcctcccttattgctaaactttgccggacttcacatccgtgggttgccagcgggcaacgttcgtagaaaaaacagccttgcggcaacgtgcggtttcccggcagatccgttttacgtaatgcccattcttcctccagcggtttatcaatggcggggagggaatccagcaataatcgggtgtatggatgtgcaggtgccgtcagcacctgctgcgcgtcgcccagttctacaatctgcccgagatacatcaccgccacccgatcgctcatatgacgtatcacgctgacattgtgactaatcagcacataggtcagcccgtgattttcctgtagcgttaccagtaaattgaggatctgcgcctgaacggagatatccagcgcagaggttggctcatcaagcacaatcacgtcaggctggctagagagtgctctggcaatggcgatacgttgccgctgcccgccggagaacgcatgaggcaggcggtcgagatactccggacgaatacccacctgcacagccaactcctctgccaacgctcgccgctgttgttcactactacgcttagctatccagagcggttctgtgatgatgcgccacaccggtaagcgcggattaaggctagagagcgggtcctgaaacaccatctgcataatgcgttgactgccagaacggatgtactgcccgtggctcggttgcagcatacccattaaaagctgtgcgagggtgcttttgccgcagccactctcgccgacgatccctaaggtttcaccacggcggatctgtaaatcaataccattaatggcatgaacatgttccgtagttttaccaagccagtttttacgggccgggaaattgatatggacgtcgcgtaacgttaataacgtgtcagacacttataacctcctgctgcggataccaacaggcacagcgctggttgttgtcaccacacgctgtcagcgccgggacgttttcacactgtgcacctgccgcatagcaacgatcgcgaaaagcgcagccgtcaggcaaatgggtgaggtttggtaccgtccctggaatggcgggtaatagctggcgtggtactccatgttctggtgcgcattgcagcaaaccaatggtatacggatgccggggatgatggataacgtctgccgtcacgccgctttcaattacgcttccggcatacatcacgtaaacgctatcgcacagttggctcaccacggccatatcatggctgatgaacagaaccgcagttccactggcgcgggctttatgtttaagcaaacgcagtacctgcaactgcaccgtgacgtccagcgccgtagtcggttcgtcggcaataatcaattgcggctcgcaggagaatgccagcgcaatcattacccgctggcgcataccaccactaagctcaaacggatagcggctcataacttccacggcatccgggatttgcatctcttccagcaggtcaatcgctttagctctggcttcccgacgacttattggttgatgatggcggatcacgtccatcatctgaagacctattcgacgtgtcggattgaggtcggtcatcggttcctgaaagatcatcgccactcgtgcgccgcgccactgacgaagctgtttttcccgcgcgttaagaacatcttctcccagcagggaaatctgcccccgatgtacgcaataactgcccgtcggtagcagacgcataatcagcattgcggtgacacttttaccactgccggattctcccaccagaccgacaatttcaccgcggttaatctgcaaggacacattgttgagcgcgtgaacatcaccgttaaaaccggggaaactcaaatgcagttgttgaatgtccagaacgggttgggtcatgactgctttcctcctgctttttagttcaactctgctttcctcctgctttcgggtcaagcagatcgcgaataccatcaccaaagagattaaacccgacggcggtaagcaaaatcgctgcccccggaaatgcgcaataccaccactgatcgagtacatagttgcgaccatttgctaccatcgcgccccattcagcactcggttgttgagcacccaggccaataaatcccaacgtggcggccattaaaatcgcgctaccgatatccaggcttgcctgcacgatcagcggcggtagggagttacgtaaaatatgccagttgatcagatgccaacgagacgcgccaaaggttttcgccgcctgaacataggtatactggcgtacaactaatgcttgcccccgcgccaggcgcacataaaagggaattcgcacaatagcaatagccagcatggcgttaaacaaactcggcccgagagcggcagccagtgccattgtcagtaccaagctaggaatgctcagcataatgtccatgatgcgcatgatgatggcgtctgcgcgtccaccaagcacaccggatagacatccgagtaggctaccaatcatacccgcaatggcaaccacgactaatccggcgagaatactttgctgactgccgaccagtacgcggctaaacagatcgcgtcccacttcatcggtgccaaaccagtgcgccgcagaaggcggcaaaaggcgggcggttaaatcaatggcgttgggatcatgcgtcgccagccacggactaaaaatcatcatcaatagcattaatacaatgatgactgcgctggtcacggtgagcggactgcctttcagcatccataccagttttgcaccgttaaatcgcgtttgtttttgtgggcgtacggcggacgtttcctcgcttagcatcattcaccacctccacgtccgatacgcggatcaatccacaaatagagcaaatccaccaccaggttgaccagcacataagcaaaactaaccacgacggcaaagcccatcactgccgggaagtcgagcgcctgtatacttgttactacccatgcacccattccgggccaggcaaaaacggtttcggtgagcactgcgccatacaacaaatcgcccagcgccaaacccaatacggtaatgcttgggatcaacgcattgggtagcgcataacataaaacgatataccagccgggcaagccgctggcccgggcggtacgaatgtagtcttcactcaattgttccagcatcgcactgcggatctggcgagcgacaattcccaggtgaacgaacgccagcgttaatgccggtaagatgagatgttgcaacgcattgaagaagacttcaccgttgccttcaagcagcgcatcgagcagataaaagccggtaacgtgcgttggtggatccagccagtcatcaagccttccgccgccgggaagaatttgcagatgaccataaaacagcacaatgacgcccagcccaagccagaacgcaggtgtggagattccggtaatggccattattcgcaccagatgatccagccagcgatttcgccagactgcagagagtatgcccagcgggatgccaatcaggagtgccagcagcagggcaccaaaagccagctccagcgtcgccgggaaaaatatacgcaactcttccagcaccggacgcccggtacgaatggatgttcccaggtcaccatgaaacaggtcgctgacgtagcggtaaaactgtacatacagtggctggtccagtcccagttgctggcgaatattttccacgatagcatcgctggcgcggtcacccgccagtaaccgcgccggatcaccagggatcagatggctgataataaacgtaatcacgcagacgcccgccaccacgagcaccagcccccagcagcgttggcgtaaaatactccagaaggtcacgttatttactcatggtattgatattgaagacctgttccagcatgggattgaacacaaagcctttcacctctttgttcatcgccagttggtagtttttctggaacaggtacacataagcagcgtcatcaatgacgattttctgtgcctgctggtagtcccgggtacgctgcgtctggtcggtggtcgcaagcgcattgcgcagtaacttatcgacctcactgttttcatagaagctgcggttacccggcagaccttttttgtcactctcaaaccagtaattcataaacatatacgggtcggcaaaatccggactccagttgccaatcgcaatgtcgtaatcacctttacccactctgtcgcgcatggtggcgttcgccagcttttccagcttcacaatgatgcccagcttgttgagactggattgtgtcgccagagcaataggctcccagttcggatcgttatcggagtagagaaacgtcaggctggtgggtttgctcgtcactttatcccattcggctttggctttcgtttcgtcatggttgtattgcattgccgtcgcatcgtagccccacatgccttccggaatcgggccgcgcatctgttttccgttaccactcagaatgccgttaaccatgccctgataatcggtagaccaggaaatggcccgacgcagatccgcctgattaagaggcgctttgctgttattcagatacagataggtaacgcgcagactcggatactctgccacattgactttattttcctgcttcagggcgttgagttgatccaccggcagcgcatcggcaatgtcaatgtcgccacgggagagctgcaggcgacgggaggcactttcaccaataatttttacgcttacccgtttgaagttcggtttattgcctgggtaatgcggatttggcaccagaactaattgctgacctttttgccagcttttcagcataaatggtccggaaccggcggtattttgcgcgaggaagccgcgagcatcatccgctgcatgttcctttaagaccgccggattgataatggatgcaccgtcattcgccagcgtgtagaggaacggtgcgaatggttggctaagggtaaacttcaccgtatgttcgtcgggagcatcaatctttaaatctttgggaaatgcttctgctggcccctggccgatttttagtagccgctcaaaagaaagttttactgcttcggcagtgacaggtgtgccatcggcaaatttagcattatctttcagggtgaacgtccactctttttgatcgtcagacgctttccagctacttgccagatcgccttcaacgtcggtactgcctttatcaccgtccgttttgtactgaaccagccgctgataagacgggtaggtcactgtccagtcgttattatctattgttaccgccgggtcgagggtttgtggatcggcggccttaccaatcaccagcatatcttttggtacggcggcgtgcgcaaccgggaaatttgtggcaaggacgagcgcgagcaatgtgggacgaaagcttatgcttctcttcatgacagtttcctgattaactgacgtgctgtgtgccaggggatataaaacaagagaattgatcagcgagcagagggtaactcgctgcctggggtaattcgaagtgccaccattcgctggagataccgacaaaaccgccaccagtcattatcgcattcagcaacagccgattgcgctgagcggcgggcgggacggaagggtgataggcatgggagcgctcgtgcatttcatcgaaccctgcgcccatatcgaggatgttcccgtgctcatcacgaagcgtcaggtcgatcgccgtgccacggctgtgattagaaccgaccgtcacatcaacaacatattgcgggtctgggcaggcttgccacaacatcgcctgtgcttgttgtgggcgatacgcatcgtaaatcaccagttgtaacccactcagctgggcgatgctgatacttttcgccagcgcggtaatcgcatccttgtgtaacagacaacgcgcttgctgataaatagctttacctgtgatgttatcagcgcaggcgtatttcaattcgatctccagatcagggaagattacggctaaatcaaccagttcggtggtatcgctcataaacggttcctgtataagacaaaaattgctgcgctttccgcttatgcagatctcatgccatgccgggataagcgccagaatgctggcttaaagttatattttttaacttttgatcaacatttgtgcagcgtagtgcagttttggtgcaagaggggaagttaaggaaggaatctcccggaatcgtagctgaaatcacagtatttaagtgacagtgtcacgttaaatgaaaacccgcgagtgcgggcgagaggaatttgtcagattttcagcggtaacacgctgctcatccagcctggaatttcttcggcgggtagggggcgggaaaagaaatatccctgaataacgcgacagtggatcttgcgtagcatctcaaattgctctttggtttcgacgccttccgccacgacggttaaattgaggctttgcccaatgctggtaatggcttcaagtaaggcaaggatgcgtttttcggtcagacaacgatcgacaaaacttttgtcaattttgatttccgttaccggaagactgactaagcgggataatccggaaaagcccgtaccaaaatcatctacgcttaagcccacgcccatatcacgcaggatctgaatgcgcttaaagatttcggtatcgtgttccatcatcatgctttccgtgatttctaccgtcagctggtggccgtcaataccccaggcgtgcattgcatcagacacctgattaggcagttgattactgcgaaagtgcagcgcgctcaagttcacggataacgccgggatatgaatattctggctacgccattctgctaactgacggcaagcttccgcgatgacccagcgcccaatattttcgatttcaccaatctcttctgcgagaggaataaaccgactagggggcacatgaccatgcaggggatcgtgccagcgagcaagggcttcgatgccgtacagttcacccgtttctgcgaagatttgcggctggtaaaccagtttcagttggttattgctaatcgcttctttcagcgctgcgcctaaaaccaaacgctcttttaccatttcgttcatcgccgggctgaagaactgccagccgttaccgccattcttgcgaatataatccattgcattgtgagcagtggagagcaagtaatcgcggtttttacccaggtcgtagctgatgccaatactcaaggtaagcgggaagggtttatcgtcaatcattatcggcttgctgaccacattccgtagctcatcggcgatttgggtaatgttactgacgtcgttttcgaggctcacgaggacaaactgcgtaccttcgatacgacagagatactgatccggtttgagtttttcacgaaagcgattgaccacttccagcaatgcctgatcggcccacgcatagccaaggctatcaatcacatcctgaatatggtcaacaccgatgagatacaccacgggagagacggctttgtcgaccaggtcatcgaggtaattgtgcaggttattgcgatttggcagaccggtcatcggatcaaattggatgagttgttcaatatgctgacggcttttttcctgttccagcgccagcgcggccatatgctggctgatatctgccacgcgttcgataaaggcgctggtttctgctccactgctggttttaatttgcaggatccccgcaggcgcgccatcacgctgacgaatggtcgcactccagctttgcgcattttgaatttctgcaccgtgggaagaactcgcccagtgtatcggcatcccgttgcgcagtgcgaacaggctaacatggctttcgttgagtacagattcgatgttacgacaaatgatttcccccatttcatgaaatggcgggctgctgcacatggcggcgagaatattgccttcaagctggcgaatctgccgttcttcggtgatatcgctgaaagtcattaccaggttctgcagatgcgcgagcacgtcataaaccgggctgatagaggctttaatccagattttttcaccggtgcgcgtcaacagcagaaattcgtcctgatcgcgggcggttttccatagcaactgttgtaaacgaatgcggttatcggcagggaattcaggaatgttcaggagtgtatcgggctgcataccgctggcttcgctaatgcagtaaccaaacatttcggtaaatgcgcgattgcactgcacaatatggcgttccggatcgaggacaatcaccggtcggtcgagatggtcaacggcaataatcaattgtcgggtctgttctttttgcgccatttctacgctggcatcccgtaccagcgccaggtaataaactttcccctcggcgctcactttgcttagcgcaaaacgggtccagattttactgccgtcttttttctccagctgcagctcccgactcatcccctcaacacgcgctttaccgccttcacggttgtgacgaatgtattcaggatgcgcaggacgcaaatcccgcggaatcagcatatcaatgttattgccaatgacttcttcacgtttgtatccccagagcttctctgcggcggggttgaaaaacatcacttcatcattttcgttaattaacaccgcacccatcatattttgctcaagggcggggaaaaaaatgccatcggcggcattatccgcatcggttagcttcatgattacctctgcatcctggcgcatttaaagactggctttccagagttcaacacggtttctacctcgtcttttggcgatatacagagcttcatcggctatttgaatgaggcgctcatagtcaggatgaccattaaacatggcggcaccgatggaaagactgagggcaatatcttcgccgtttgcggctttcagtttggttttctccacccgactgcgaatacgttctgcggtacgtaacgtttcgttttcagaagcttcagtcaaaacaatgataaattcatcgcccccgtagcggaaaacataatcactactgcggacgttgtcataaaaggcctgagagactttacgcagaatttcatcaccagtgttatggccccacgtatcgttgatctctttgaatttatcaacgtcaataatcagcacactcagcggtgtaccggtccggttggcatgggcaatttcgcgtttgaagatagtcggtaggaaacggcggttaagtaatttcgtcagtacatccataccgacttcgtggcggcttacttcttcaaacaattcacgcagcaaggtaataatttggcttacggtatttcttatctgtaataaaaatttcacccgcagacttctgttattcaaatttctggtgttacgcatggtttgattgaaaataccgtcgaaatcctgaatcagacgggagatatggcctacttcggcaataccactaaaataatgtcgacctttatggttaaaccacaggccaaaatcagcctggcttaaaggcaaactactgcctaaatcagaatccagcaggattttatagataatatctatttcccaactaagtatactggctatttgccgttctttttcttcttcggcgttttccagtaagctgaagatacgatagttttcatcttccttactggcactactgtcactaaaggtaaacgcgcgagtcatcacttccatcgcgatatcaatactgttaatgctgaaatggtagacctgaagtttttctgcggcggaataatcgctagagaagatcaccggatagaggatttttttcagcacccgaaaccccatctcgacaatttctaccggaattcctatgcgggcatgcacttccgcgacggtatgctggatttgtattagcctttcgacatcgtcaacctgggcagaaagcacgttaataatccagcgttccatcgcactcttcaactgccgctcaacttgttcattactcaagaattcttcggcatgcgggtcgatgcggacaattcgataaaactcgatactcagataatgagcatgcgcaacggcaatttccgcggctttagcacgaatgggcggatctgcctgttcgacaagtccggtccactcatctttcattcttttaaaatacatctccataattcacacccttataaggctgggaaatcagacggaatcaaaatgaaacgcaacgtgcgagatcgactaactgcaccatattctcctgaaatatgaagatatactgaaaagaaataagcgatttaggacagtttcaatctacgctactgttcttcagaagagtatagcccatcgtaattatttttcggtgacagcgaatatcgtatggtttttcatattcatacatttttattagggatttatggctgtttaactaagtgtggttaatttgacttaagtaagcatgattattagtgggatagtttaagagggtaacaagccggtgggtaaagcaccggcttgttacaaagtaagaatgggagtttaactgccccagcgactttgcagatagctgaccgcttgttgagtctgcggtttattcagatagtcctcacggaacaagatggtgccgctaatttcgggcacagcatcgttaagatcgagctgctttttcagttccggtacgccgccgttaatcatccagtctggctctatcttactaggttcacccactttatagaaggcgataccgatatacaggcgggtcctggtcggtttaacgacatccgcccaccattttgccaacacgtcataacgcgcggcactccgactgaacggccagtaaatttggggagcaatgtaatccagcaatccttgttccacccatcgacgggtgtcagcgtaggattcgtcataggctgccgcgcctcgggtatcggaaccgagcggatcgtgacttcggttacgccacacgcctgccgggctaacaccaaattcgactcccggcttaatgcttttaatggtgtggcttacctttgcaattaactgctgagtattgttgcgccgccagtctgctttactcgcaaatgcgcctccgtatttacggtacgtttcgttatcatttagccgactacccggactctccgtatagaaatagtcgtcaaactgcacgccatctacgggatagcgggaaaccacttctgcgactatacttgtgatccagtcctgaacctcagggatgcccgggtcgaggacaaagcgatcgccagacgttctgatccagtcgcggtgttgcacatagacgctcgccggttgttgagacagagtgctattcagttccctgatagtaccgggcttcgtattaacgcttacgcgataggggttaaaccaggcgtgtactttcatcccacgcttgtgggcttcgtcgagcataaattgcagcggatcgtaacccggattttcaccaatcttaccggtcataagatcggaccacggcaaaattttgcttggccacagggcggtaccgtccggcttgacctggaaaaagaccgtgtttatgccgagacgttgcagatgatccagtttgtcgatcatcgcctgttgttgtacacgggcccggctggtggggttactaatgttaacgctggaaaccggtggccagtcgagccgagaaaccgtggccagccagatgccacgcatcggttgactgctttgttgcgtcgtggctggtggcttactacctgctggtggtgtcaccatggactctggaggcgtgcttttacaactacacagtaaaagtgccagtgcaactagtatcgctggtcttctaatcgttaatttcttgtttcgggagcagatatccatatgtgctggtttccggtaaacagatgtgcgctcattctcgtacttatccccgttaagtcaatacgacagcaagcacgaaaaagggagcgatgaattatcgctcccttgtcttataaccattcagacatggttagtgtttcttgtcattcatcacaatatagtgtggactacgtgcacgcgggtgcagggagaagtgaccttttggtgcgttctgactgttgattggctccagagtgacgccggtatttgctttgcctttacgatcatgaacagcatagagaataaagggcagggcaagtaccaccaggaaactaacaaccagtaattcaacatacatatcggtagaatcaccctggatgttatccggcggcaggaaggaaacaataaacgccataatactagtcagcagaccgacaattgccacgaccagtttcacccctttaccaccagggatattaaatgtgcgttttaagtcaggatgtttaagaaccaacacaatgtagccaataaacagcatgaaataagcacacagataaatcaccaccgtcagcgccagtgcgatcaggaaggacatgttgttaccgccaccggtattggtgaggatgatcaacgcgatagacgtaatcaccagctggctaatgaccagcgttaccggtacgccatttttgttcattttagcgaatgccgctggcagcaggtttttctgcgctgttacatacatcccgcgagaaggaccaacaatccaggaggcgatttccgccagaacacccagcaacagcagtgcggagatcacgcgaaccgtccactcaatttctggtgccacatgggacatcagaacggtaaaggtttgcattacccctgcggagaggttgatttcattacccggaatgaccatcgcaatagacaaaccaccaacagagcttaagcagattgccgccaccatcagcagtaacatagccaacggatagtcgcgccctgggttgctcatttcattgacgtgggttgcggatgcttctacgcccatataactcaaaatgaaggcaacaaatactaccagggtgcccactttagagaagtcagggaagaaggtcttgctatccatttcgatagcaacgggggcaccggagtgcagataaatagccgctaatgcgatcaaaataaatgcaggtaacaggataccggcgaagaagccaactttagcaattcgcgccgtgtatttcgtgccaccaaactgcgttaatgccagcgcccaaagaatgatgagtgctgcaatagttttggtaatggggtcttcattcagcgctggccatttcaggatgtaggagagtgcccctaacacgaaatagagcatcggaataaaaccaatggcgatttgcagatagccaaaactgatcgctgcaaatccccatctcggccccagagtattacttacccaggcgaagacaccaccttcttcccagccgtcgacggtggccatttccgcagcacaaagtcccacgggaataaaccataaaatcccgcctaatagcaggaagaagactaaactaaagccgcttgttgcgaaggtagggtattcataaacagccattaccatgcttgccgttatggcaaagaatccaagtaatgtgagctgcttagctttacctgtctgtacacttgtagccatattatccccctaaaacggtattcctgtcggaaccgcacctgttttgttctgaagcgtattcagaacaatattttccgttgctaatgccagtgaacagactttggaaattgtcccgaaacgggttcgtttcgggacaccgttaccgttaaacgttatcaggtatgtttaaagctgttctgttgggcaataccctgcagtttcgggtgatcgctgagatatttcagggaggctttgtagtcttccagcaacagttcagcaaagtccatttcgaagccgcgacgacacataatgcgcatcaccacgatgtcggtggcttcaccgccgagagtgaaggccggaacctgccagccgcgcagacgcagacgttcagagaggtcatacagggtgtatcccggatcttcaccatctttcagtttgaagcaaaccgccgggatgccttcgtccgggcgacccgtacagatgaactcatacggccccagtttggcgatttcatccgccagataagcggcaacctggtaagaggcgttctgtactttggtatagccttcacgaccgaggcgcaggaattcatagtactgtgcaattacctgacccgccgggcgggagaagttgatggcaaaagtaccaatttgaccacccaggtagtcaacgttgaacaccagttcctgcggcagcgcttcttcgtcacgccagataacccagccgcagcccagcggagccagaccgaatttatggccactagcactgatgcttttcacacgcggcaggcggaagtcccagacgatatccggggcgacgaacggtgccaggaagccaccgctggcagcgtcgatgtgcatgtcgatgtcgataccggtatcggcctggaatttatccagcgcatcgtgcagcggttgtgggaactcatagttaccagtgtaggtcacgccgaaagtcggcaccacgccgatggtgttttcgtcacaggcttcaatcatgcgtttcgggtccataaacaactgaccggggcgcatagggatctcacgcagctccacatcccagtagcgggcgaatttatgccagcagatttgtaccggaccgcacaccaggtttggtttatccgttggtttgcctgcagcttccatacgcttgcgccaacgccatctcatcgccatcccgccgagcatacaggcctcggaagaaccaatggtgttggtgccaacggcctgaccatttttcggcgcaggcgcatgccacagatcggcaaccatatttacgcaacgcaggtcgatggctgcggattgcggatattcttctttgtcgatccagtttttgttaatggataaatccatcaatttgtggacattttcgtcgtcccaggtctggcagaaagtggccaggttctgacgagcgttgccatcaagatataattcgtcattgataatctggaatgcgacatcgtcgcgcatttcgtgcagcggaaaacgtttactttctgcgatagtggaaatagacttcgcaccaaaacgactatcgagtagttcgctccttaaatccgttacttgcttcttatccattttaaactccttaaaatgattggatcgcattaaaaaagtaggatttatcgataaagtaagcaagtgcaaaggactcgtgtttaaataacaaaatcctaatgttatttatcgtgagatattacgcgaataatattttttcattgaaaaacaatacaatatgaaattcttgggtggtggtaaggtgttttatgctgttatttttatgcgcattctgtgtctcctgaattatcacgtaaaaatcagaccttaaaatatcactattagtacttgattattattttgaacgcatttataaaattattacataaaaatagcgaatattgctaaaatccccgccaacgatgtgttgacggggctgttattattttggcaataatactccggtataagtatttaccggatgagaaagatattgtttaacggcagtgttaacattctctaccgtcatttgtttcaacaattgctcctgctcagtccatgctgcaggatcgtcatattgaataagactatttacaatagtgttcgctaattgttgaacgctacgctgttggatatcgaggctgcgctgaacgttttgctggtattcattcagttcttgctcactgatccctttagccagacgcttaaccatcacttcattcgctaacgttaacagttcatcatgtcgttctggttgacaagtaaaagccagcaaatgactgatatctttggcctgaggatcaacgctgaggcgagaagaaacgctgtatgctccagatgcctgttcacgaatattaacacgtagatcttttgccagtgcgacgttaaaagcatcgagcgccatacgcgtcggcagattaacaggtgtccgggaatcataacgcttccactgactaacctgtgccacaggttcattttgttcttttacagtaacgcttgcgttgtccgtcgcgcgagttaatggtttacctgcggctaatgggctatcagagtgtttgatacttcctaagtaacgcgtaattaacgccacgagtttgtcttctgcgacattaccgacaatgacaaacgtgatatccgctggagaactaaacaattggcgatcggcagccagcgcatctgcggcagtaaactgtgcaatctgattttcttgcagtaatttcgtgcggtcatcagcatagcgcgtctcatacatctgctgggcgaatttctccgctggacgctggtcgagcgttttcaacgcctgaatttgagcattttgtaggcttgcccaaatattatcgttaatcgtgctgtgggtgattcgctggttaatcaactgaaaaccaggttcagggttattagtccgcgcgctaacggagagcaacgtattcatgccactgactttactgctcatggttacgctattttccgcactccagcgtttcaggctggaagaggagagttcgccaacgccgcttccgctaactgctttatttgccagcgcgataagacttttttgctgcgcagggaaacttaaatcgcctttattgcttacggcaataatttgtagcttttgctcttcacccgcggattttgccagaataaccctggcaccattggaaagtgttaaacttgtcagattctccgccagcgtttctttgctgctaatttccgcctgtgggtctgcgtctactgttaagcttaaatttctgcctgggaagacgtaagccgccagctttttgttggcgtactccttttccagcgccaggatagccgcaggagacaatgcttttttggcggcaacctcattgtttaccatttgctcccaaaatgcgtcctggttctttcttaactgctgccatttttccgccagactttgcacggtaatttgctgccacagacgtttgctaagttgatatgtctcttccgggctcaagaacggcgtattatttaaactgctggatgccaggcgactggtcagcatacgtaaatcacgttcagcttgctgatcaaccgcatttttcagccaggtgaggcgggtagatttgacatcatcgagttcttcagcagaaaaaccatgctgatcaatggttgccaactctgccattaatgcattcgcagcatcctgcatattatcgtctcgtgcatttacacggaaaaacaggctctgataatcgggtgcaattttaacgctgcgcgcagtgccgccagaaatagtcttcaactcgccgctctgtatgcgttcctgcagacgttgattgaacagctgaactaacatgctccattcagcttgttcgataaagctttgctcatcgttcacttgtaccattggcaggcgataatagagtgcgatgccgttcacccggttttctttatcattaatgatattaaagcgcaggtggttttcggcttttgtcggccagacgcgattttcagctgctttgttagccggaagcttacttaaattatcctttatcagcgccagcgcttctttactgtcgatatcgccgaccacgataaaggtcatattatttggttgataccagcgttgataaaattggcgcaattgtgccggtgtgaccgtggcgacagtatccatcaggccgataggttcacggtctaaattacgggtatttgccagcaggaaagggcggcgcgcctgagaggtgcgccatttcgcatcctgatgggcacgccattcctcagtaattacgccacgttcagcgtctacttcgagtttttcaaaggttgcggcattactccattcactgaagattgccatcacttgttgcagattttgtttctgcgtagtcggcaaactcacctgatacaccgtttcgtcatagctggtataggcattaacatcgcgaccaaaacgcaggcccatactctcaaatgtttcgatgactttattacccggccatgtttttgtgccgttaaacatcatatgttctacaaaatgagccacgccgagctcattgtcttcttcctgcaaactaccggtatgaatttgcagccataaatttacctgatcctttggatgagcatgcggataaatcatatatcgcaagccattgtccagttgcccggtaattaacttttcatcctgcggtaaggcggcggcaatcagccgcccggggagcaacagagttgccactaacgtcagtaagaaacagaggtttctcataattatctccatgcgaaaaccgggcgaatttacccggttaagtaaaatccgaactattaaaatttcatgctgacatcaagccagaaagtacggccactggcgtaggtcgccacaccggtgttcgttgtatcaacagcggttttgctatccagtacattgagaatatcggcactgatcgtcaggttttgttgttgcagaaattgtggcgtccaggacaagcgggtgtcccaggtcaggctgctatccagtttttcgtcaacatactgcttgtaatcactatattcgctgatgtattgcgcatttgtcttaccaaggataatgcgagctttacgcgcttcttgccaggccagcgtattcgcccacactaacccgctcggttgatgcgtgaaatccatgtttaaggagatctttaatgggttattaaaatctgccactggaacgctatcgtaagagaccagattaccgttataaaccacctggttatcaccggtattgctctcctcataaccattgtttaagctcaagttgcccttgctcttgatatagctaaagacaatttgtgggttaatatctacctggcggatatgcaggggttcggccagttcaaaactgaggctgaagctatgcgttttggttttgccatcgttgttatattcagtaatggtggttttagtcgcgctgtcggtacgactgcttttgctgatttgatcatgcgcttcacggtaaacatagtttgcacgcgcaataacgttcttaccgattttctgctgcaatcccattgccagttcatcgttataaggcgttttcaaatcctgataacgcgtcagagttttattaccacttacgctttccgtccagctattgcggatatcacgtaatcccatatcaagaatattcccgccatagtaacggttataacctgctgtaatcatactggtttgattagcaaaaatatcccattccgtcataaagcgcggggagatattgtggttactcagatagttgtcatagtcataccgcacgccgggcattaaactcacattacgccagctaatgcgatccgccatatacagcgtgtagttgtcaattcccaggcggcctttacctttatggtaaatggtatggttagttttctttccggcagcattaatcacataggattcagactggttatggcgttcagtccacgcatcggaatagatgtattccgcgccgaagtagggttgatggctaacattacccacggcgaatttttgccagtccaggcgtgttttgaaggtgtaattatctacagcctgggaaatgtgtcctaatccgccacgggtgcaacgccctgtaatatcaccatatgtacaactaagttcggtgtaccagatgtcatgatcgtgacgggtataatcactaatatgatcccaaccaacggtggtacgcagtttggcccatgcgagctgcgtatccatatcccatgccagaccataggatttattacccatttcgcgatcagactgcgggaaggtgctggtattataatcacggctggagccggtatattttaaggttaaatcgtgggtaaagcggtcgctggcaaaccaggtaaatttgcttaatgcagtatcgataacgtttttatactgtgcccgaccggcgacaatgccgtcattgctaacataatccgcgcgggtgatatcagactggcggcggcttaaaccggcggtaacgccgaagttatcagcgagttcctgattaaagctcaaggtataaaagttctttttaaaatctggggagtaataagtacttccactagagccttgattaaatgcgctcttgttattctcatcgatatggcttgttaaccagtcgctacgcgtagtgcgataacccaatttcaccttgctatcatcagcgttgaagcgtttgatctttgcatcaattaccccgccattgaagcgaccaaattcaaccggcacaaaactgtcataaagcgtcacattgtccagtaagctgacatcaagataatacccctgactcatcccgctaatattggttgcactactggcatcggactcattcgctgggttcaggttattagttgcactaataccgtcaatcaaataggcattctggtaggggctcgcaccgtgaatagagattttctcagggcgaatatctccctggttcaagctggtactttgcgtactatccatgcgtaccgcagggttggttctcagcagatcgctgatattgccattcccggtcggtaaacgctcgatgctttcactggtgtaatgcgtgttgccgtttacgggtacagggacaggagcatagaccgtcatctcttcaaaaaaatgcatgtacatgtttttgtcatcgacggcctgcgccacatcagcgccacataaaatgacgccaggaataagaactcgcttcatttatttatatctccgtacagcagggcttttattgtttttataaaaccgcgctaatgtcacaaatatcatcggccaggttccagacaccgggttgatgtgtaaccataatgacgccgcttgtgggtagtttttcacgcactaaacgcagtaagcggatagcctcttgttcctcaagatgagaggtagtttcgtcaagaaatatccatttcggacgtcgtaaaattaatcgtgccagggcgatacgttgtttttcgccgctggaaagaatatctccccagcgatcgtggtcatgaatacgcgcagccaatttcccaagaccaacctgatgcagtacttcgctcaagcttttatcgtctacgggcaggggaagtgctttacaaataatctctttcagtaagccggttttgattaacggtgtttgactcacataccaactgtcagcaggagaagaaatatcacctttaaaccacggccagcagtgggataatgttttaagcagtgtggtttttcccgcgccagagtagcctttcagtaatagccatttgcctgggctaacatgaaagttcaggttctctaatatgatcttattatcaggcgtacgaatactcgcatcagccacttgtaccgcatgttggcaatttttaggcttattcgtagggcgctgttcagtgagttgatggaactcatacaagcgatcgataaccgcagccagttcagcaagttcgtcatatttataaataaaccagcttaaattgttgcttaccagcataaatgcctggcggcttttcatcagtccgcccagattgatctgcccgctaataaactgcggcaataacagaaagtagggaagaacgctaaggctgcggctataaatattctgccagtaatcaagccaccgctgacgattcattaaacgatgccagttctctttaatggtatgaaaattgtcgctcaactcctggcgttgtagagactcagcattgcttagcgcaatcagttctgcctgcttattatgctgcacaagatttgttcgaaatgtcgcttcgctacgttgtttttccacattaagcggacgaatacgtttacccaccttatgggtaaataaagttccaccgatcacaatgagcacgacggtatagaccatatacccctggatattccattctgttccaccaacagtgaaactgagcgtacccgcgctttcccaaagaataacggtaaaggtgatcagcatgctaagactctggatgaagccaaaactaagactgagcgttttgctgatcagtaagagaatgtcttcagcgatacgttggtcagggttatctgtatttttatgctcgccgtagatctgcgtgaagtagtagtttttatctgcaaaccaccgattaaggtagtaatctgttaaccattcgcgccagcgaatagtcagtagtttaattaaccatgttttgtttacggatattaatacaaagatccccagcagggcagggaaccaaaggacaagctgccaaagcttatcggtttctttctggcttagcgcattgaaaaaatcattattccagtcgtttaaccagacctgaattttaaccacgccaaggatcatggcgaggataataatgattaacaacacactagttttattattcttacgcagccaaaagggcttcaacagacagagatactttgctatcaacatacgaagcgtaatgggaatggttatcattagcgaaaattgattgtgccatccaatgattatctatggcaatgatttactgatgaaatttatttaagtatcatttaacaatatgaaatataaaggaatatttcattttcagtggttatggttatgctattgataatcaaggatattgctaatgccctgatgcataccacgtaagccaggattttcgcaagggaagatgatgatgacgaaacacccgacaggaatttatgtcgggtgccttgttaaggtcataagaaggaggctaagaatggagttaaaagagagcgttattaattattctccatttgttttgcaacatccataatgtggtaaagcggtactctgttcttagctaactctaccatggcgttcatataaggtaccatggtactaaaaaggattttataaccttcgcaaaaataagaaacagtctcattgtttactttagtaatacgatgcttaggacaaccgccattgcagataggtttatatgcacattgctgacatttcgctggaatccgttttttttgcgctgtcagttgtacactgttcatcgttttgagttcagatttattaatgtttccaattttgtactgtggatagacaaaatggtcgcattcgtaaatgtctccattactttcaacaaccagattatccttgcaggactcctggaaaatacaactggtatgcccattccccaaaaaacggctgacaaagctttcaaactgacggatgaaaatttcacccacatcgtttttaacccattgcataaaaatggtactcataaacttgccataagccgtgggaggcacagaaaaatcaatgatacggaatgtgttctcactatgaccactgaaatcaatattcggcgtcccggtttctagcaattcgataaattgcatatgtttactgccgatagattttaaaaaatgataaacctcaagagggtaatggacattaacgttattaatgacggttaacgtattaaactctacttgataacttttcagacgctcgatggctgctatcacttttgcaaaagtaccgttaccactattactgcgtctgtaacggtcatgtaactcctgggggccatcgatgctgataccaaccagaaattcatgttctttgagaaaggcacaccattcattattcaataaaatgccattcgtttgtaatgcattaaaaatacgtttttggcctgcatagcgttgttgatagtgaataactttacggaaaaaatccaggccagccagagtgggttcaccgccttgccaggtaaaatagacctgattgccagacgctgcgatatattgtttgatgaactctttcagagtgctgtcatccatccatttttcatgagtaaactggctctctttttcaaggtaaaaacagtaatcacatttgagattacattgaaaactggagggcttggctgtaacgtgcatcgctatctcgctcaataaggcggcggaaaaatccgccgcatgaaggtttagttatttcgcttcgcttagtgctttcttgatattgttaaacttctcctgatttacctcgctaagcggtggctggctgctgtcgataaactctcttaccacgccttgcatctctttaacgacctgcggattggcggcggcaaggttatctttttgctgtagatccgtcagtttgtagagacctaactgattgttttctactgtatagacaaggctataatcgttatttctcaccgtataagagaattggcttaagtcctcagtgttggggttatgcgggtaatcgtcactctgatggcgaacaaatttgtggtaattatcccagaatggaatattttcctcgtcaaaccagtgagaataagaggttatccaggtcagatttttatgtggctcgccttgtttcttatcttgcaaccagggcagcaaggaaacgccatccagcttaaggtcttttggaatgctgatatcggctgcatcaagagctgtcgggtagaaatccattgcggaaatcagcttgtcataattaccgggttgaagttttcctttccaccacataaacattggggtgtgagtaccgccaggataggtctgactcttatagcctttttgcgccccgttcagcggcagaggaccatcgataaccgcaccattatcggaggtaaagagaataattgtattgtcatactgtccgtttttcttcagttgttcgagaatgcgttttacaccctgatcaacagaataaacggaagcgtagtagttatctgctgtttgactaccggtattaaattgcttctgatattgatccggtgcaggattatcatttggcaggtgcggagcattataagccaggtaaagcataaaaggctggtcaagtgttttggcacgatcaacaacgccaattgcctcatcggttaactgatcgctgatataaccttttgcggggacacgttcacgatttttgaacagactaggggagttgtaatatgccgttcctgcagcgtggaatcccataaagtaatcaaagccacggttttgaggttgccattcttccgcagaaaatgtggtgaagttgtcatgatagtcacgcgtttgtttatcttccggtaccggcacattactgattttactcaagtgccatttacctactgctgcagtgtaataaccatgattctggaataattcaggcaagaaagtttctgttagcggaataccatcctgagcatcggtattggaatagacaccaaagcgggcgggagctcgaccggtcattattgcggcgcgggaggggccggaaacaccgtgtgccacatagccgttagtaaaacgtacgccttcatccattaaactaaggagcgtcggcgtacttttttgtgcagcttcaatggctttatctatccctattttgtaggtatcgacaacttcacgattttccattgtttttgggtcaaaagatcccttatcaaaaggaagttgtccataaccaagatcatccatggtcagtacgataatatttggctttcctttggtactgtattctgtcggcgtaaagtcactgaaagcaacgtttgttttggttgctttcagctttacatcatctgccgcatgagcagcaaatgcagccataccagatgccagtatcaaagatatgctggtacttacgacacttttctttaatgcagacttcataaatgttcctcttcttattgtacttaattccaaagtaattttacgaagagaaataagtggatgtaagtgaagttagtcacataaagagatagcagatttagctaaaaaaagggaaaaaacagtccataaagcgttgacattactttctgttctattaagtaatttctcgccgataaacaactaatttattgatatttaataaattattgcattttactgacaaaatgcagaattgagatcataaataatcatgcaacaggttatgcaagtgcataaatatgtgatggatgtcacttatttatttcaataaatatatcgcctaaaaacaacgcggggcagggaatggctgccccatttaattcttacgcagcgtgtgtggttgactactcgttagcaaataatcaaatagctaaagcattcatcgtgttgcccgtattcatacccgtgtgactttgacaacggtactccttagaaactctcttcggactgttgccgaaatgtttgcggaacgcataaataaaataagatgtactggcataaccacattgttcggcaattttattgacactaccttctacgcgtatcaaattttttgcgtgctgcattcttgcatctaaaagaatctgactgaatgtcgtttgctcttgcttaagttttttcttcaacaggctttcactgatgtacaggcagtcacaaatatctttcagcttccatgggtgcgccggcttcatgttgacaatatttctcactttcccagaaacggatagcacaccgttagttaatagtgtaatgaaacctttgcatgcggcaaaaatagacaggcaagaaaaaagcaaaagttcactaaaattatgatgattgcgttcttcgctgttgagataagcaatcatttcattaagcaatccagtcggtacattactagcacgtaaaaacttcgcaggaacaggcaccgtcactgtctggatgttagtgcattgtagatattttttaatggtattttcagtaaatccgatctctttaaaatgccgctcataaggttcaaaatgcgtacgaacagcgttatctaccatcaggatctcgccgtcagagaaggcgtaatctttatctaaaatgttagcgttgaaggcatgatgaataaatataacagaacaaacgaggctcattttatctccttaaaacaataaagtttttatcgatacttttttaacatttcatatttataatttgctgtttgttttcagccttgcaaactattgataatgaaatgtgtaagatctcttgcaatgcgacccatttctgaaatactcagctgatcaattgccgaaaaaatggctatcaacgtaagtgtcagtaataagacaaccacaattgcagacatgatttctttatagttgtctctttgcgtgattttgtttttcactgtggtcgcatgcatttcaaatatgtttatttagcggataacgttaaaaatcgttaatcagtatgcttaatataacaggctggagaaaagaggaaataggactggtgcttcagtactgagcggagtttcttacagctgtaggcagaagtttatatcttatagtatgtagtttaatttaatccatgtgagcaaattgcgaaataatagtcaatgaggaattcttctgctgtgcggatgacagcagaagaaatgagaagaggcattaattacttggttctaattcaaccggaatacttttatagccaggaatgccacttaatggatcgtggttatcaagtgttagcatgtgattgctttctggaaaataggtcaccagactgcggtcagccatagagtaaatgaccacttttaatctatccatgcggcgactgctgcgcttaccgtctggcgtaagcgcaataagattaactctttcgccgttttttacacggcaaattttagcttgtttagcactcataaagaccacatctcgttgaccgaatacccctcgatagcgatcatccataccataaatcgtcgtgttgtactgatcgtggctgcgtactgtcgccatgaccagcttactgttaaacgcactagagggatcttctaacagccctttgctggtaatgaaattagccttaccactcggcgtcatccagcgcctttcagcagctgcatttatcaggtgaaaaccaccgggatgacggatgcgctggttatagtcggcgaactctggcagcacagcttcaatgtcattgcgaatgcgatcataatcttccaccagatactcccaggctaccacgctctggggtagtgctgcctgcgcgattcccgcgaccactgcacactcacttttcagcattacaccggcgggttttaacacgccacggctggcatgaatcatgctcatactatcctcaacggttaccgcctgcgcaccgtttttttgcatgtcaatctcgctacgtcccaggaccggcagaatatagctatgccgtgcggtcaacagatgagagcggttaagcttagtggctacgtgtaccgccaaatctaattgcgttaacggtacagcgctcgcttcccgatctggcattgccagcgcaaaattgccccccatgcagatcaatgctcgagcctgccccgtacatattgcttgcatgctggtaattgcagcatgtccaggtgcatgaggtggggtgaagccatagcgctcacccagacgagccagaaactctgcagacggtttctcggtgataccgacggttcggtcgccctgtacattagagtgtccacgtagtgggcagatacccgcaccaggcttgccaatgttacctttcatcaacagcagattgaccagttgctgtacgttctgggtaccatgttcgtgctgagtgatccccattccgtaacagataatggtgcgttcggcagcggcatatgcgtcagccagttcggcgatttgtgtctgacttagtccagaaatacgttcgatatctttccactcggaattgagaacgtcacggcgtagctcgtcaaagccgacggtatgcgtttgaataaactcgtcatcaagcaaactaggccgacctgcggcgcttgcagcatcatcgcgctcaattaacaggcgcatcatccccttgagcaacgccatatcgccaccaatgcgcacgttatagtaggcactggccaactgagtctcagagttcgtcagcatttcaaacgggttttgcggtgcggtaaatcgctccaggccacgttcctgtagaggattgatggcgatcattttcgctccccgtttcactaaagcgcgcaagctagtcagcatgcgagggtggtttgtaccagggttatgcccaatgcaaatgactaaatcgcacttctcaaagtcttccagcaacacggtccctttacctacaccgatactcgctgccaaacccacgcttgtcggttcatggcacatgttggagcagtcgggaaagttattgctcccgtattcacgggcaaaaagctgataaagaaaggcagcttcattggaagtgcggccgctagtatagaattcagcctgattgggatcactatagctttgaaggcgtgcgccaatttcgtcgaaagcttgttgccagcttaatggcttgtaacagtcgctgacggcatcatatttcaaaggctgagtgagtcgccccgcagcctcaagctcgtggtctccccaggtaagtaaactttgaaccgtattctcagcaaagaaagaggcgtttacctgcttatccgtgacttcccaggcgattgcttttgcgccgttttcacaaatgtcgaaactcgcactgtgcttaggatctggccatgcacaacccggacagtcaaagccctctggcttattcatgtcaaacatggcaataacatcctggcgtatatccatctgcttacgtactgcattcgctacggatttaacagcaccccaaccacctgcagcaccctggtaggattcaatttttttcttcatctacttatcctgtgtggaaatgaattattaggatttgtaatagcgatgatgcacagtacatacaaagggattatcgccaacatggatatataagagtaggggactactctctttctatttttaatctattatcgttaaacaatagattaaatacgataagttaagcatcatctctcatagtgtttaaattaacatatttttcaatataaaaaataagactctggcttcaattgtgcgcggattttcttacaggtgtaggctaatagccttcacaaaataattatccgcgcaattttcgtgaatggagcgcatagactaaggtcaaaatcacaattattcatagataaaagtgacaccaatgacactctggacggttccggcactaaccttgtttcctgtttgtccataggttgcgcttaaacccagaggtactttgcttttatttactgtccccagggagacattttctcccgtagccagtatttttccattacgcattagagtgacacccactccgcttgcttttgttgcatcaggtgctgtgttagcaaacacttgtcggctactgtcagtggtggcaccgctaagataaaaactgagcttttgttcgctactgcaatatacgccaaggggtatttctgcgcttccaggaaagtccgggagatccacggtgacatttcgactatcaacggtgcagccgcctgttggcataacaacattgttattactaataatattccacgtaaaattacgcggatttccgcttcctaatgttgcaattttatacatatgaatacgggcaatgacttcccccgcttttatgacaactccaccggccgccccaactggggtaatatagagttttaacggtaatggcatcggtgtcttatcaccaatatccaatacgttggtatttgtcgtcaacgggaaggggtaggtcacattattccagtacaggcttcctttataactctgtagggagcctgcgaaagcactgccttgtaccaggtttatatgatcagtgtcgtaccagccgccgtaatcattccagcaacttatatgctgagacaagtctacaaccagattctggcccggctgtattacagggtcgagattaacataaacagaggttgtacctgctccaatactactcccgccatcgacattacaactgaaggcaaaaactttgcctgccattaatagaagataaataccgaacaggacctttatactgattgttttacccatgatatatcctaaggttaaaaattgatttaaaaagaaggctaagaaaatcgaatcgacgttattgccaggtgtagatcacattgattagcgcctcgatcgttccctggcttgcgtttccattcaccgtgatagctcttgccttaagtggaaactgtgcattacgagtgatctcatcaacaataaccgttttgctatcgccattttttaacgcagcatcctggtcatccctcagctctatctgaatattttcggcagtaccttcatttttgtaataacccgtattgtcagtactacctgtcacgattgccgtcactgcacttgtttcaaccggacaatcggttaaactcaaagtaatattgtgccagccagatgcagaaccaggttgttgcagattgcgcgtataaagatccccgagattaacgttagcttctttggtttgaatagtgcagggtttagcgactacccgaccattaacagtgatagtgacatcggcggcctggagagttgctgtgaataacgcgcaaaacgtagctaacaggaacctcttgtgaagtcttttcatatctgactctgattattgaaattcaagggtaaaggttgcgctagccctcaccagtcccggattgacggacttctgagtactcttcagacgagcggagtaaggcaaaatattgttctgttctggtaccagtgggatccactgcatcccggcatgaagatcattcagtttcaccggacgcatatttgcgtccaatatttctatacccaaaccggaggccgtattgcttccttcatccagtttcaacaaagtattattttctgcatcctcaataccgttaaatgcaacccgaacccccgttgtccctttgctgcattcacttaacgtaatctgaaaagggacggctggacttgtgctaccggtcgttggaaattgtctggcactgtttttttggagatctacggtaaaattaaggctatcgctactgactgtgcagccataatcgaggacgcgcccgctaattttaataacgctatctgcggataaagcagaataggtggttaaccccagacataaaccgaggaaaataatgttattgtatttcataatctattgttccttagcgacagattgctgtctgctggttcagtaaggtaccaggagaaacttcaggaagcttgtactcgacaatacagttactgtttttatctttgccccaactaacctgtaattgcccactctgtggaagtccagtcagataaacctgaccattttccgcgacaatgctgccatttttattctctccgtgtgtgacaattgcaccgaatggaacgctcttattaccgtacttcaacgtcattaatactttcccgccgatttgtgcattaaatgttgctctggcaatagcaccgtgagttgggatgacagtgaccacggtttcatccagttcaacattatctgcaagggaattcgcgttaagagcaacacggttttctctatattctgtcgcaaatggtaatatggcatagccacgccagtcggtatgaattccggtctggttctctattttgacattatcagcaccaggagccttaaccagaaccattgtgtcgcccagcggctgtccaaaggtgatgccatcagcatgagcaataatcccaccactcattccgtaataaatctggctgctgtcaccactccgactgtaaccgacattagtattaccataagctccacgataattaagagaactgtaaccactagtgccagagcttgtattacctccgtgggtgttaccgacctgaacgctataattcaggttattatccggcagcagagtgccataaaccccgcttagattggtcatgccgcctttcaaatcgttactcatactgtaactggcgttactattacgaaatgcgctctgactgtctgtacgcatccaatgactgaagggaacattaagcgtaaaagcgagtaaatgatcccgatcgttttgccatatattattggaatagctgtaattcaggctagtcgtaatatcaccaaacggcacatttaatccaaaacttatttgctggtcgctgcgactcgtgttccagtaactttggcgactggcactgaaaaatgtcgtaccgtaatttccaagctgctgagagatgcttatttgttcctgaccacgcttactgtagaacagattaaaataatcaataaattgtgtctgctcattggtgtctccggtaggaggcttgacggtgtaaccactcattcgactgtaggcactgtcggataagttataaaaaccttgcgtagaatagcgatatcctgcgacctggatattggttccacaacaagtttattgctgcacttgttgaagagagtatttgcaaaaacattttatgtcgctaaataacatgacgatttcattatgcatgttatttataaaccgtgactaaacagaatattattgcgaacaagggaagtgtcaggaaaggtcaagagctaccaatggttaatatggctataaatcattagctatggttaatgtttgcttgctgaaactaacaccgaattgctctaaacagataagtgcagggtttattaaagctgtccgacagactttcttaacctggtaatatctctcttgggtgactctccaaacatccgcgaatattcccgacactaatgggatagctttcgtaaccgacagcataggctgctgtggtgacatcgtaatgttcattcagcatctgtcgcctgacttcattgagacgtagccatttctgataccggagtggactcattcccgcttgatccgtccttaaataagtaacagcaccctctggtgttttcgtatgcagtgtctatgcgacagacactgcgctcttagcatggggcagggaataaccaggctatttctccatgcacaggccaattatgaaagaggagaggcttaagttcttgaaccctgaacgaataacgactaccagaaaagcacttcgcatcactcagacatgatttaacataatatacattatgcgcaccaatataaaccaaggaagaatccagtcgttggcggtcatgattgtcatgctcattaacaatgaccaaaccccatatctcacttactaccgtattctcggcttaaccgtccatgcaacctcaacacattgctttcaactgccgtcaccacgttctccggaaaatctgtcggtaaactagtcttcacgttatccagtgctgctggaatcattctggcaaagtcactcaggatttcatgcatctgcacttccgggaatctcagcacctttgctgtcgccaaaaaatgtcgcggataaattttatcgattgccgtttttttgcctttggatgcgttaagccccattgccagtttgagatcgctgatgtgtattcccgtaccgccaaggaccggaaatgcactaatgatgtcgtaaaatggcgtgagtcgataactgccgccagcctgaataaatacggagaagttttttgcatgaccgtccgttgcgccaatcaaccactggaagacctggaatttcataaaatcatagcgatctttcagcgcctcgctggaccccatcaaaaaagccatgatccgcgcgatgcctgggcctccatcactttcatatttcacgctactaggtaaaccgaatgtctgacacatatcctcctgtggcaagcgaagtaaaaccgttcgctcagcattccaacgcctgtcaaagcgttcgaccgctaacgcgcgcacatttcccgctttaatgatttctgcgtccggaacattcaacccaagttctttcgccagcagcagacagtaatactcattatcaacgctttggctgagatcgagcgtcgcattgggctgcctgatttcgccaatcggtaatttaatgatgtgcgtcgtcggcgttattcctttcggaatgcaccagtcattgcctattctgagcagtgctgtcttctcctgtgcgccagcaacgctgatgcgaaagtcattttcttctctaatcatgcctagcgggatatctgctttataagccgttaatacttcttcaagtctggcttcagtaagcttttcccatgccattatcggatgcgttacggtttcgtcttcgggtattaacgtcacggcaccaacgctgtctcgccctatttcactcaataaatcaaacggttgtctggatttggcatgataacgtttaacgatccggtcacgtacaatcgggctatcgggtaacaggttatcgaagaagttaaatacggcatcagaggtgatattccccctctgcaatggcaggctaagactcaacggtctggcataacggcttgctaaccactccggtgcatacttaaaggtgtgcgcgccgttggctaacttcgttaactcgcctacccgctggttgttcatccaagtgacaagtttaggcattaccactccagattttgctgttctgtactttctgggctggcatttttcgcgtcgcatagcgtcatactgagttcaaggctctgtaaaatcttaaaaaatgtcgtgagcgtggtattgtcagggttgttttcgaaattggaaatcgtcgcctgcttaataccaatttttttcgccagctcgctctgcgtccagccattttgctggcgaaccagtttcattgcattcgccaattgcgttgggctatagatcttctgaaagctcatcatgtcatacgtccacagcaagtttatccgcttaaggggatattataagttttatcctttagtgaggataagtcaatctggaaacacatcttatccgctctacgggataaacgctgcgatatccgcgatcgcggataaaaaggaggatttaaataaggcgttgatgcgccgtttgaagtcggcaatattaagccgcatgccatctcgacatgcggcttatacggtttaccagctatatttcactcccagcatgccctgagtatcgctatagcctttatcacctagttgcacaccgacattcccccacaggctaaggttgttatttactttcgcctcaaccccggtacgtacttcaccgagattacgcgcaccttcacggcctacggtttgaccattcatcttcacggcgtagactttgctattgttgatccagttcgcttcaatgtaaggctggaactcacgctgtttaccatcgtcacgctggtgatggctgttcaggtaggttttcaccccaagtcgcgtttgcacatttccgtcgccttccgtttcaatgcgcgttccgtctttccgggtatggtcggaatctttcacacccatccaggtgatttgcgcctgtggctggacgtaccaggtattcagcgtcccttcgctgccgctaaatgttcccgcttcaaaggtatacccaccctcaacagaggccgtcacaccgcgagaatcatagtcgtcagcagaacggttatcggaactgacgctgttatcaaaccagttatacagcgcccagctgtcaacataagcgccggtcttattcgcatcgttctgataccaggtcgcgtacagcccagcgctgtaaccgctgatgcgcccatcgcttttataacccacacgattactctgagtattactgtgctgattggcgtagcctgccatcacgccaagatgccagcgatcctgcgcgttgctactccactgcgccaaatcgccgcctagctgcaatacatagcggttagcctgagtatttagctgaccgtcaccggccctactacgttcgtgccctccgacatgacgcatccacatactgcttgcgctcccctgagaatgcagactatctgtatactgcggctcacccagacggtcgtgtaaacgatggctaaacaggctgttggctgcggcaatgttgctgatatagcttccggcctccgggcgataaacacttgggccttccggatccacaacagggggattattgatgggatcgggtgtatccgctggcgttacgccgtcccatttactggtcagataccagtttttctcgtcattccccttccctttagccagcgtgtagacgtaagccccagcttcgacagttccggtggtcagcgcgaagttacctgcagaattaccgccaacctcaatgagttcaataccgttgaccgtttgtgcaccgacgccgccaatgttatcaacccgaacgcgagtgttcccttgggtatcgcctttcacgttcatcttatcggtggggctattatcgccgcccagcgtcgcgttgaacgtcatcaggccattgtttccggtatagttgccgttaacggtcagtacattccccggtttccccccttcgctattcatttgaaccgtgccgccattctccaggttgccgccgatagtggttttagcgacacgcagtgccccccccaggcataacgttcatatcacctgcagtggtgacatttccgctcatcacaccgctgttatggatattaatgtgttgacttgccatattaatggcagagtcggaaccgaaagcaatttccccccccacgatatccgtcgtaccctgatatgccgcggaatcgttgttaagagtcaggatcccggtacccagttttgtcacatcaccgctaccgctgatactgtgcgtcatcgcccagctacgctcagtggagatggtgagcaggccattattgataacggaagcatcacccaggtttttctgctcgttgacgctgagcgcgctgcctgtatcaatgttgaattgccccacaaagcggctattatcgccatccaactctacatctgtcctggcggttgcgctcacgatacccttcccgcttatgctattacgcagttcgccagtcacgttttttagcgttaacagaccgtcattggcaatatttcctctgcctaacccctgagtattatcgaggctgacttccgcatttgggctaatgctggttaacgcattgtagcgtgcattaagcccctcgatagccagcgttccccctgtaacattcaggtttccgccacctgtcagttcaccctgactgatcccacctttatttaccgtcagcgccccctctttgaacaaaacagtgctacccatctgcccggtgaatgtctctaccgtctgcgtgcttccattaagatcgacgatggccgcgttgctgatgttcagttcccgggtgttgccaagtgcaccatccgcatcggtacgtaatgtccccatctgaacgtaggttgccccctgatagtcgttctgaccgttggaaaggctaacctgtcgcaccgtattgattgccagatccccttcaccaccgatttttgcgctcatatcggccgttgcgccataggctccgccatgttcggctaacgtcagcttttgcccaccatggatgttcagcgctttcagcccatagttaacgtacaaaccattacctggtgcggtcgtgaggcggaatccataatcaccctcggcgaccaccgttccgttttgcgcaatgtgtaacgttttgtccgcttccacctcgtcgccctgtaaatcacgtaacgttaaactgccaccgctcccaataaccgtttgcgccttcaccagttgaacgccgacatggctatcgtcgtgttccagcaaattgagcgtcgtcagagggttattcgccatgggatcattccacggtttaggcacgtcgataagcacgtcgcccgtcccgtttacctgatagttacggcctttccaggtgtagtcacccgcgccgacaaccagcgtatcgacgctgatatatccctccgcgagcgtcgcagcaggaatatccgtatcgaaaatgatggtacctccattcatggccagtccaccaatggattgctctccaacttttacgcttgtggtattttcactgtcagactgcaacatcgcgtgagtaagcgcagcggtgttgtcgcgttccagagtgaaggtactgtctttcagttgggcaacaccggcgaattcagtccctgttgcatgggtaaagccaaacatcttgtcggaggaactcagctgcactcgcatcaagccatcgcctttgagcgcattggtcagcgtgtaatctcctgcactgttcgtacttgcgagaatgtcgagcgtaccggggtttgcaatggttacttcactgctccccatgcccgttaccccatctgccgtatgagacgcaatggtcaggaggccgtcattgaccagcgttttaccgctataagtattccctgcattgaacaccgtatggcctgcatcatggatcacttttccgtctttatcgtcacctgtaatcagcatatcgacctggtagccggcatcactgttattggtatgattaaagacaaaaacgccttcgccaagaccaaactccactttcgtcgcattggtgataaatccggcatctgccgccgcctcaccgtgagcagcaccaatgtttagcgttcctacagcaggctcaaaaacacctaagtaaacttctccaccttcgacattcagcgtaccgttattcgtcagggttaacgtacccgtaccagatgtccctacgtacatattgaatgtttcaagaagagagttctgcccatccaccctcacgtcgcccttacttttgtcattgagagctatctgtgtatcacgcgctttaactatacctccggtggtaatattcagttcacccgtgcctaatacaccgacctgtagcaattgtgcgttagtagaacttgtctttaaattccagagactgtccgtactaatattaactatccccttaccggaggcatttcctccgataaatccatagcccgtactattaagggtggcaccattactgacatttacgataccgctaccaaaattaccgacattgatacccacagtatcgaagctacttgtcgcatccatcaggttcagtgtgccgataccgcttgctttatcgcccaaaaaagtaatattttggcttacgaacttaccgccatcgctaatattgaggtttccgacgcccgcaacaccaatggtggtatagacattcttattgacctcccacattccccccgtggtgatgctgacattcccgacgccggtttctccataaccgagactacttcctccgttgctgacaacaagcccctgattactgatattcatttcgccgtggccgtcataaccaagattagttccgagattagtgataacggagttcttatccttaacagtaatgttgcctgtgcctgtttctttcatccccgcagtgataattccgctatctactttgccttcactgctgacattaagttcaccgtcgccagcatcaccgatatagatatagcggaaagcttcgcccgttccgaggaaattccaatgccctttatcggtcacgttgacgacaccgtgggaaccgtcctgaacgcccaccaaactatattctttgttattaatcagtccattattggaaatattgactgtgccattaccgaaatatccattatagagtctgcgtaccgtgatgacagagtcttgatcctgcacattcagggttccgataccggtggcattgccaccgataatcgtattttcagccgtaaccaaccccccctcgcgaatagtcgcctccccagttccttgattaccaatttgaaattcaatactggaatcattattttttattagccactcgccacccttttcaacgacaacctggccattactgcccgcctgatagcctaaaatggcgacgatactactcgtgacgtaacccttatccgtaatatttaaactacctgtgccatagctacctatttcgaataattcggtcgtcagaacagagtcctctccctcaacattgaccgtcccgacgcctcctgtgctagaacctaatcttaaatagcctccatcgacgtgacccttctgtttaatattcagcgtccccgttccggattgacccacatttaaaggccttgcattatttccgctatcatacaatcgccaggtgccacccaaaacattaacggtgccctcactgtcctcattagcgccaatgacgctggtagtaatagtggttaaggaggcattaccgccagccaaaatattaagcactccagtgccataccagccaaccaggtaggcatcataagcaacatcagtatcaatattggtaatctgatcattatcaacttccagacttgcaccagacgcactaccgcttagtgccagcaaaacacccagcgtcaatctactgaatttcgttgtcagtccagaggatttacgcaaattaaccgtgcttgttttacctgccctgcgagttaattcgctgcaggcctgaaatacctgtagagtgcaattccatatcacgcgatagattctattcatataaacgctccatatacaaacaatacagccacgaaagagatgagtcgtcagacattaaaaatgaaacttattaaattgtcagaggtctgtattgagtgttagttggaggtgggaaggtgtcaatttggctaatttgctaatgctttcgaattgatagattaaaaattgcatagttcttattttatttaaatatgaactatgagttattgttgcttaataagaaaactgtttctttcaataggaaaattatcatcatcatatttaacaaagaatagcactaattgctaaaaatcgaagtttattaaaccccttttgcatccattagtgtctttaggaatattcgctataaaataagggttgtgcttaatgctttaagaaaaatagcaattttcccttgaatatcgtactggtgatggaacgatgaatctgcaagctggcttttaacaagccagctctaaaagaagggaaataagaataactatactcaaaaactaacagccacggtcatcatgatgtggctgtcaatgaaattataacccaggcgctttccataagctcgtcgtcagtccatgatcaaccagccccagctgatcctgataaactgcctgccacttatcgcgactatcctgataaagttcatgcttttccgggtctggtgtgtgcgtccgttcccagcgaaccaggcgttctccggtttctgccatactactaaaaattccggcaccgacgccagctgcaatggcacatcctaatgcagtggcttctttgaccaccggaatattgacgggtaatccgctgacatcagcgagaatttgactccataatttccctttactacctccgcctgcaaagactaagctactaggatgaatattgctgaaatcagcaatttgctgcaagttacacgcacttacaatcgccgcattttcttccagcgcacggaacaatgtcgctttgttacatttatccgggtcaatggacaagttaataaaggaaggcgcagcgtgataccaggttttaaagcgcattctgtcggagaagatcggcattacgccccagctcccaggcggcacccgactggccatctcttccagcagcgtataggtgtcgatgcctaaacgttcggcaatcagtttttcttcggcacagaaagcatcgcggaaccagcgcatggtgagtccggtaaaaaagcttatagattcagcttgtaccatgccaggaataacatgaggattaacgcgcacgttcatttctgggtctgtcaccggcgcggctaaatttacaacttgctgccagaatgtgccgccaagaaccgcggtttgtgccggacgcacaacgcctaacccaaggcaaccaagctgcacgtcgcctcctccaacgaccaccggagtgcccgccttcagaccgcagagttccgccgcttgactacttaccacgcccagcaatgtgccggtttctttgacaggagaaagaatatcggcacgtaggccagccatatccagcaatgcaggtttccagtcacgggtggttagatcaagaagtcccgtggtgccagcgttagagggatccaccgccagttcgccgctgagcatataggccagccagtcgctgatcatggtgatggtacttgcctgacggtaaatatcggaacgatggtgcgccagccaaagtaatctggggatggcacttaaagccagtgtttgtccggtcgcgcgataaacttcgttttcaaaggtattgttgtgcagttctttaagttcgctaacttcgcgtgccgctctggcatccacattggcgcaggcccagatcggggctccttcattattatataaaacaatgccttcacgcatgctacatgcgctaacggcagcgatatactccggggctatgccggcgttgtgcagcgcctggcgcatacactcacacgccagttgccagtttttgttgagatcaaattccatagaaccaggaacgtccggtactgccagatgccgccactccgcctgtcccactgctatttgattgccttccaggtcgaatatcacagcccgaatacttccggtgcctgcatccagcgccatcaggtagtacttactttcactaagggtaaagagtcgagccattagattatcctcggcttatgcgttctgtctgttcctctatacgttctccatcattcccggtaataaggtcatgcaaatttaactacgtaaaatcgccgctgctgtgtcctgatcggtaaccagtgcgttgatataaccgcctttcattgcagcggcaattgcttcggctttattttctccccctgccacgccaacccggacgggtatggtcttcagcgcgcttaaaggtaagccaatcagttcgttatgtattttgatattcgtgacaacgtcaccttttgcatcaaaaaagtagcctaaaatgtcgccaaccgccccttttcggccaatcattaactgttcgccctggctgatataaccggagcgaatgattgtcgcatcgtcctgttgactcacagcaccaatgccgacaatcgccacatccgctgcttgcgcggctaacagaacatctttgacgcaattttcattttttagcgtacgggcaatgtcagcggaggatgcccgcaacggagccggaataatattcacactgcacgccgcgttaagctgcccgattcccgtcatataagaaccgacgccaccggagagcgtgaccaggcgaatttgctgactgctaataaaaccacttaagcgttgcagcgtattcatggttgcctcgccaaaaccaatcgccagcatctgttgtggttgaagtaaactcatcaacatatgcgccgcgcctatccccagtcgcccaccgacatcagcatccgcaagcccagggatcacccggacatgttgcaggctaaactgacgacgtaattgagtttcatattccagacagccttcaaagcgagaattaatctgtacgcgaataatgccggactgatgccctttctccagcaatcggctcactttcaaacgtgtcaggccgagacgatcgctgatctcgctctgggtcagcccgtcgtgatagtaaaaccacgcgatccgcgcgacctgttcttcttcacacattccctgttcactaattgcgctatcgttgattgtcataattcattcttcactttgaacatatttaaatctttaatgcaattgttcagttcttgctcatttatatctgtgatggcaaccacagtttgactctacgagcatgaacaaacgcaaccgtgaaaatcaaaatagcataaattgtgatctattcgtcggaaatatgtgcaatgtccacctaaggttatgaacaaattaaaagcagaaatacatttgttcaaaactcacctgcaaaactgaacgggggaaatatgcaaacgagtgatacccgcgcgttaccgctactttgcgcccgcagcgtttataaacagtatagtggggtcaatgtcctgaaaggcatcgattttacgttgcatcagggggaggtccacgccctgctcggcggcaatggtgccggtaaaagcacgttaatgaagattattgccggtattacccctgctgatagcggtacgctggagattgagggcaacaactacgtcagattaacgccagttcatgctcatcagctgggtatttatctcgttccccaggaaccgctgcttttcccaagcctgagcataaaagaaaacatcctgtttgggctggcaaaaaaacagctctccatgcagaaaatgaagaacttgctggcggcgctgggctgccagtttgatctgcatagtctggcaggaagcctggatgtcgccgatcgccaaatggtggaaatcctccgcgggctgatgcgcgacagccggattctgatcctcgatgaacctaccgccagccttacccctgcggaaaccgaacgcttgtttagtcgcttgcaagagctgcttgctactggcgtgggtattgtttttatcagccataagctgccggaaattcgccagattgccgatcgaattagcgtgatgcgcgacggaaccatcgccttaagcggcaaaaccagcgaactgtctaccgacgacattattcaggccatcaccccagcggtacgggaaaaaagcctctctgccagccaaaaattatggctggagttacctggtaaccgcccacaacatgccgccggaacgccggtgctgacactggaaaatctgaccggcgaaggtttcaggaatgtcagcctgacgctcaatgccggagaaattctgggcctggctgggctggtgggggccggacgcacagaactggccgagacgctctatggtctgcgtactttgcgtggcggacgcattatgctgaatggtaaagagatcaataaattatccactggagaacgtttactgcgcggtctggtttatctgccggaagatcgccagagttccggactgaatctcgatgctagcctggcctggaacgtctgcgcccttactcataaccttcgtggattctgggcgaaaaccgcgaaagataatgccaccctggaacgttatcgtcgggcgctgaatattaaattcaaccaaccggaacaagctgcacggacattatccggtggcaaccagcaaaaaatcctcattgccaaatgcttggaagctagcccgcaagtattgattgtcgatgagccgacgcgcggcgtggatgtcagcgcccgtaatgatatctaccagctgttgcgcagcatcgccgcacaaaatgtggctgtgctgcttatctcctccgacctggaagagatcgaactgatggcagatcgtgtgtatgtgatgcatcagggcgaaattacccactctgcactgaccgagcgcgatattaatgtcgagactattatgcgcgttgccttcggcgatagtcagcgtcaggaggcgagttgctgagctaaagtcagcgtcaggaggcgtcatgctgaagtttattcagaacaaccgtgaaatcacggcactgctggcggtggtgctgctgtttgtattacccggttttctcgaccgccagtatttaagtgtgcaaacgctgaccatggtttatagcagcgcgcaaatcctgatcctgctggcaatgggcgcgacgctggtaatgcttacgcgcaatattgatgttagtgtgggtagcattaccggaatgtgcgcggtgctgttggggatgttactgaacgcaggatatagtctacctgttgcttgtgtcgcgactttactgcttggtttgctcgcgggatttttcaacggtgtcctggtcgcgtggctaaagatccctgccattgttgccacccttggcacgttagggttgtacagaggcatcatgttgctgtggactggcggcaaatggattgaagggttacccgccgaactgaaacagctctccgccccgctgctgcttggcgttagtgcaattggttggttgacgataattctggtggcatttatggcctggctgctggcaaagacggcgtttggacgcagtttttatgccacgggcgataatttacagggcgctcgtcaactgggcgttcgtactgaagccattcgcattgtggcatttagcttgaacggctgcatggcggcactggcgggaattgtgtttgctagccagattggttttatccccaaccagaccggtaccgggctggagatgaaagcaattgcagcctgcgtgctgggcggcattagtttgctcggtggttccggtgcgatcattggtgcggtactcggcgcatggttcctgacgcagatcgatagcgtactggtgctgttgcgcattccggcatggtggaatgattttatcgcgggtctggttctgctggcggtgctggtgtttgatggacgcctgcgttgtgcgctggaacgtaatctacggcggcaaaaatatgcccgctttatgacgccaccgccatccgttaaacccgctagcagtggtaaaaaacgggaggccgcataatgcgtattcgctacggttgggaactggctcttgccgcactgctcgttattgagattgtcgcatttggtgcaattaacccgcgaatgttagatctcaatatgttgctgttcagcaccagtgactttatctgcattggcattgtcgccctaccgctaacgatggtgattgtcagtggcgggatcgatattagctttggtagcaccatcggcctctgcgccattgcattgggcgtactgtttcaaagtggtgtgccgatgccgctggcgatactcctgaccttactgctcggcgcattgtgcgggctgatcaacgccggattaattatctataccaaagttaacccgctggtgattacgcttggcacgctgtatctgtttgccggaagcgctctgctgctttccggtatggccggagcgacggggtacgaaggtattggtggattcccgatggcgtttacagatttcgctaacctggatgtgctgggactccccgttccgctgattatcttcctgatatgtctcctcgttttctggctctggctgcataaaacccatgccggacgtaatgtgtttttgattgggcaaagcccgcgcgtggcgctttatagcgcgattccagttaaccgtaccttatgtgcgctctatgccatgacggggctggcgtctgcggtcgccgctgtgctgctggtaagctattttggtagtgcacgttccgatctcggtgcgagctttctgatgcccgccatcaccgccgtggtgcttggcggggccaatatttatggtggttccggttccattatcggcaccgccattgcggttttattagtgggatatttgcaacaaggtttgcaaatggcaggagtgccaaatcaggtgtccagcgccctttccggtgcgctacttatcgtcgttgtcgtaggtcgttccgttagcctgcatcgccagcaaattaaagagtggctggcgcgtcgggccaataacccattgccataaaggatatcttcatgacacttcatcgctttaagaaaatcgccttacttagcgctcttggcattgccgcaatctctatgaatgtgcaggccgcagagcgtattgcatttattcccaaactggttggcgtgggattttttaccagcggtggcaacggcgcacaacaagcgggtaaagagctgggcgttgatgtgacctacgacgggccgacagaacccagtgtttctggtcaggtacagttgattaataacttcgtcaatcaaggttataacgccattatcgtttctgcggttagccctgatggcttgtgtccggcactgaaacgcgccatgcaacgtggtgtgagagtgctgacctgggactctgatactaaaccggagtgccgctcttactacattaatcagggaacgcccgcccagttaggaggtatgttggtggatatggcggcgcgtcaggtgaataaagacaaagccaaagtcgcgtttttctacagtagccccaccgttacggaccaaaaccagtgggtgaaagaagcgaaagcgaaaatcgccaaagagcatccaggctgggaaattgtcactacgcagtttggctataacgatgccactaaaagcttacaaaccgcagaaggaatattaaaagcgtatagcgatctcgacgccattatcgcccccgatgccaacgccctgcccgctgccgcacaagccgcagaaaacttgaaaaatgacaaagtagcgattgtcggattcagtacgccaaatgtgatgcgcccgtatgtagagcgcggcacggtgaaagaatttggcctgtgggatgtggttcagcaaggcaaaattagtgtgtatgtcgcggatgcattattgaaaaaaggaagtatgaaaacgggcgacaagctggatatcaagggcgtaggtcaggttgaagtcagcccaaacagcgttcagggctatgactacgaagcggatggtaatggcatcgtactgttaccggagcgcgtgatattcaacaaagagaatatcggcaaatacgatttctgatgtgcattacttaaccggagtaagttatggcagatttagacgatattaaagatggtaaagattttcgtaccgatcaaccgcaaaaaaatatcccttttaccctgaaaggttgcggtgcgctggattggggaatgcagagtcgcttaagccggatatttaatccgaaaacgggtaaaaccgtgatgctggcttttgaccatggttattttcagggaccgactaccggacttgaacgcattgatataaatatcgccccgctgtttgaacatgccgatgtattaatgtgtacgcgcggcattttgcgcagcgtagttccccctgcgaccaataggccggtggtactgcgggcgagtggtgcgaactctattctggcggaattaagtaatgaagccgtggcgttaagcatggatgacgccgtgcgcctgaacagttgcgcggtggcggcgcaggtttatatcggcagcgaatatgaacatcagagcatcaaaaatattattcagctggttgatgccggaatgaaagtgggaatgccgaccatggccgtgactggcgtgggcaaagatatggtgcgcgatcagcgttatttcagcctcgcgactcgaatcgccgctgaaatgggggcgcaaattatcaaaacctattatgtcgaaaaaggttttgaacggattgttgccggatgtccggtacccattgttattgctggcggtaaaaaattaccggagcgcgaggcgctggaaatgtgctggcaggctatcgatcagggcgcttctggtgtggatatggggcgtaatattttccagtctgaccatccggtggcgatgatgaaagccgtacaggcggtggttcaccataacgaaacggctgatcgggcatatgaactctatctgagtgaaaaacagtaactgcggatctaaggagaagaattatgcacgtcacactggttgaaattaacgttcatgaagacaaggttgacgagtttatcgaagtttttcgccagaaccacctgggctctgtacaggaagaaggcaatttgcgcttcgatgtcttacaggacccggaagtgaatagccgcttttatatctacgaagcctataaagatgaagacgcagtggcgttccataaaaccacgccccactacaaaacctgtgtcgcgaaactggaatctttaatgaccgggccgcgtaaaaaacgtctgttcaatggtttgatgccgtgaggcgaatttatcaattttatctacaattggggtaacgcgctgacgggagtaaaaaaatgtctgactggaacccctctttatatctacacttttccgctgaacgaagccgtccggcggtggagctgcttgccagagtgccgctggaaaatgtcgaatatgttgccgatcttggctgtggcccaggtaacagcaccgcccttctacaacaacgttggcctgcggccaggataacaggcatcgacagctctccggcgatgattgctgaagcgcgcagtgctttgccagactgccagttcgtggaagcagacatccgcaactggcaaccggtacaggcactcgatctgatttttgctaatgccagtctgcaatggctgcccgaccactacgaattgtttcctcatctggtttctttacttaatccgcagggcgtgctggcagtacagatgccagataactggctggagccgacccatgtgctcatgcgcgaagttgcctgggaacaaaactacccggatcgcgggcgtgagccgttggctggcgttcatgcttactacgatattttgagcgaagccggatgtgaggtcgatatctggcgaaccacctactatcaccagatgccgagtcaccaggcgattatcgattgggtgactgccactggattacgtccgtggttacaggatctgaccgagagcgaacagcagctttttcttaagcgctaccatcagatgctggaagagcagtatccactgcaagagaacggacagatactgctggcatttccgcgtctgtttattgttgcccggcgtatggagtaaatatcacgtcagctggtaatgacgatcgggaagaatttttgctggaatttcggcttcatcgttcatctgtaacaggtcaatttcaatagcgttgcagatggcatccagtggtaaatcattgttttcagtaccgaacggatcttccagttcttccgccagacaatccaggctaataaaagtgtaggaaatcagcacagagataaaaggcgtcatgtaatgcaggtccacgaccagcgcgaacggcagcatgatacaaaacagataaacggtacgatgcaaaatcagggtgtaggcaaagggaattggcgtataggcaatgcgctcgcatcctgccaggaccgcactaatatcattaagccgatcgttgaggctaataaacaggatatcactaagctgtccattgcggcgctgaaccgccaaccattctcccattattaacaagatacggttagctggagagttgctagccagtacacgctgaagatcttcagtcttgagataatgagccagcacttccgcctgtggctgtttgcgtaatgtcatgcgtaaacagtgggcgaaagcgatttgcagccgggcaaactcccttacacttgcgctatccggcaatgtcgtttttacctcgcgcagtaagctccgactggcaatcatcaactgcccccaaagttttcgcgcttcaacgtaacgggcgtacccggcattattacgaaaaccaagaaaaatggcgatggcgacaccgagaatgctgaacggtgcgagggtgaatttgatgcccagatgcgtgtaccagggcagcatgaaaataacagcgatagaaaagagaaaattgagtagtaagcggctggatatcttggataatacactgccgtgccagacaaaaatacggcgcagccagtgttgttgtggacgaacaatcatggttatcttcaggcgtggaaaagtcgccctattaaacgtgattacgatcacattctcaagacgctacttacaaattacctacaagcttacaacattagcaggcgctgcatgtggcacctgttaatgataaaggcatataggatgttgtaactaatatggtgaaataagaaacccggtcgaaaccgggttcagaagtaacggtgttattagcacaacggacgtacagcttcgcgcatccctttttcgagaatcgcatccaggtcattagcaacctgctcgaccagaccaggcacttgcgtcaggtcctgctcccagtggtctttttctgccaaaacaatcgctaccagttcctgggtgccgataacacggtcacgatgctggctccagagttgctgataacgttccagccagtgtgcatcgtcctgtaccggatatgtttcgccgttacgctcaccacgatagaacgcaatcaatgccgctaatgcgaaagtaaggcgcgccggaagtgtgccgtttgccttctgccctgccagcagctgtggcaggatgcgggtgcggaacttggtcataccgttgagcgcgatagacagcagctgatgcttaatgtacgggttacggaaacgcccggtgactgcactggcgaaagattccagttcatcacgaggcaaatccagtaccggaataatttcttcgtagatagctttttcaacgaatgcgcaaatttcagcatcgttcatcgcttcacctacggtatccagccctgcctggaacgccaccggcaccagcgcggtgtgcgcaccgttgaggattgccactttgcgttctttgtacggtttaatatcgtcaacaatcagcacgttgagcggatatttgtccagacgcagttcagtcgctaaggatttcggtccctgaatcacaaacaggtaaaagtgttcagcggtgtcgagaaaaccatcgtgataacccagttcttcttccagtttagccacttcatcgcgcggataaccggtaacgatacggtccaccagcgtagaacagaagctgttagcctgatccagccattgaataaatgcttctggcagtgcccactcttgcgcatagcgcagcaccagttcacgcaacgcgtcgccattgtagtcaatcaactcacacggaatgatgatccaacctttatccagcgcaccgttgaaatggctaaagcgttcgaacagcagacgggtcagttttgccggatagcttaccgctggcgcgtcatcgaatttatcgcccgcatggtagctgatacccgcttcggtggtgttagagaaaacaaagcgcatttccgggttgtgcgccagtttcaggaattcatcgtattcactgtagacgctgatttcacgattaacgctgcgaatcagacgcgcgtcgctgaccgcttcccccttctcattcaggccacggataatggtggtgtacagaccatcctgcgtgctcagactcggcgggaaactagtttcaatcggacgaacaacgaccacgccagaattcagatcggtgtgctcattcaggagatcgatttgccagtcaacaaaggcgcgcaggaagttaccttcaccaaactgaatgatacgttctggatactgtgcaccgggaaaatcgcgacgatttagtgttttcacaatgggttcccttctgattagtcatacaacctgtttgaattggtacgacaggttagcaaactttaatacgccgaacccctgttttgatcaactcctgatgattaatgagcagttttatgagaaaagtgtggcgcggatcatggtttaatcgaggaaaaacgccttttcctggatcataaagtggtagaacacattgcattcaaatcgcgcgtaatgaataaagatgtcagacaacttcctcaccgtaacgcatagtgctggtacggttgcgcccatctttcttgctgcgatacagacacgtatcggcttcgaccatcaatttattaaagtcatcggtcagcgttaggtagcttgcgcgaccactaccgacgccaatacttaccgtgagataaagcgttttttgttgccaggtgaatggttgcagttcaacgcctttacggattttttccgccattagcagaccatcgacaggattcacgctcggcactgcaacagcaaattcttcgccgcccattcgcgccaccagccccttatcaccgacaatcttctgaatatgccgggcaaacacgcttaacactttatcgccacattcatgtccatagttatcgttaatgcttttgaaatagtcgatatcaagcagcatgacagtcagatgttgtgtctgtttcaggcttggacttttcagcgcctcataaagaccggaccgactgtaaacctgagtcagaaaatcaaagtcggctcgcagcgcaacttgcttcattaggctattgatcgctgccacgctaaaagaaaccataattgggcatatcgccatcgtggcaataccgagacgtgcggagaacatttgcggaatggagaacgggctaccgacgctgatatcaatcacgctatttgccaccagtacgatttccaccgcaccggtgacaaaggtcaacagacatgttacctgcggcgtatagcgcactgcacaccagattaatgcaggcagcgggaacgccagactccccgctccgccaatgactacgctggcaataacgctcacaataagcgcgatggcgggcatcatctgttctgctttaaagcgcggcagcactccaggaatagccaacgtcagcatacaaggcacgatcaacacgcccgtactgaattgctcactgaaccagtccgcaagcaaaggccagaaatccagactatcaatactgaccgaaccaagatagcatgttcgctgacagcggcggcaaataaaggtaccctgggaatgctattttgtcgttttccgcaattctcatggctgattcatctgtacaaccagccagtgatagattaccgccacgatataacgttgttgttcttcgcttaagctaacaccctgcggaatgttatgccacttagccagacaaccgcgacagcaggtcgcggtggcgtgctgagcgataaacaccggatgcccgcgcatgggggtttgcttaccgtcattagccggtaatgccggagcaagacgtttagcgacaaaatccgccgcatgttgttcgatgactggcgcgcctttctccaggcaatactgacgctctttcatgcccagacgaaagcgagagcgaaatttactacgggataaacgcgcgaagagtggatcgagagactgcattaataaacgctacgccctaactgtttcgtcaattgttcaagaacggcaatacccgcaaggctgttacctgcatcatccagttccggactccagacagcgatggccatttcatgcggaacaatcgccacaataccgccaccaacgccagatttcgccggtagccccacccgccaggcaaactcccccgcgttctggtacataccactggtcgccatcagcgcgttaatttgccgcgcctgcattggcgtcaccactggttcatcaatatgaatagctttcccctgattagccagaaagacaaacgtccgggccagctctacacagctcattttcagagcgcagtaatgaaagtagttttgcagaacggttgtcacgtcatgatggaaattgccaaagctcttcatcagccaggcgatagccgcatttcgcgcggaatgttcaaattcggaacgcgctaccaccgtatcgtaggaaatatcagacacaccgcttaagccgcgcacgacttccagcatacgttgccgtggtgcgcttaatcgcccttgcaacatatcgcagaccaccagcgcaccggcattaatgaacggattacgcggtataccctgctccatttccagttgcactaaggaattgaacggacttccagacggatctttgccgacgcgttgccagatttcctcttcggagtaatgacgcatggcgacaacgagactcagcactttggaaatagactgaatggaaaaacgttcttgcgcgtctccggcctgaaaaagctgtccgtcaacggtacagatagcaatccccaatcgggaaccgtctactgtagccagcgccggaatataatccgcgactttaccctgaccaatgagcggccgcacttgccgcaagatgttttctaaaattgcattatccatggcgactgccactttctactcctggaccgcaggtctgaaaagacctgcgagtatatcagagctgaatatgtcgcgtcagatccggtctttccacaccgtctggatattacagaattcgtgtaagccgaaatgggaaagctcacgaccaaagccactctttttcacgccaccaaaggccactcgcgcgtcgctggcacaataaccattgataaacaccccaccgcattccagacgtgccgccatctgtctggcctgtgtttcgtcagtggtaaaaatggtcgcactaaggccgaactcactatcattagccagttccagtgcatgttctgcatctttcgcaatggtgattgccgcaacggggccaaacatttcttcccgaaacgcggtcatttctggggtaacattcgccagaaccgttggcggatagtagttacctgccccagccatcttttccccgcccagtaacaaacgcgcaccctgcgccagggttttctccacctgatgatgcagctcatcacgtaaatcaaaacgagccattggtccgagagcgttctcttcgtcacggggatcgcccattttcaaggctgccgcagctgccacaaaacgttcggtaaatgcgctagcaattccctcttcgataataaagcgttttgccgctgcacatacctgtccggtattctgataacgtccggctaccgccgctttcaccgccagttccagatcggcatcgttaagcacaataaacggatcgctaccgcccagttccagtacgcattttttcagtgccgctccagcctgtgcgccaatagccgctcccgcacgaacacttccggtcaccgtgacagcagcaatgcggctgtctttaatcatctgactgacaccgtcgttgtcggcattcagccagccatatacgccttgtgggatacccgcatctttaaacacctgggcaatgagctgtgcacagcccatcacattcggcgtatgtttaagtaagtagccgttacctgcaagaatgatgggaacagcgccacgcatcacctgccataacggaaaattccacggcataatcgccagaatcgtccccaacggtcgatactcaataaccgcctgctgattttccaccagcgtaggttccgccttcagcattgccggaccatgttctgcataccagtcacacaaattcgcgcttttcgccacttcagcgcgcgcctggttgattggtttgcccatttcgcgggtgatcatttgcgccatttcttcgctacgagcgcgcagagccttaccgatatcacgcagtttttcagcacgataatctatatttgtctcgcgccagtcgcgaaagcctgctgccgccagctgaagtgcgttttcgatatcgtcagcgccagcccacggcagcacagaaagttgttcacccgtggcaggatttatgctaattgcatgagttgccggagtaatggtcatcggggtatctcctttatgagtcatggtatgaagatacgcagatttactcttgctttaaaatgaataatattaagccacttattcacgaatcgagaatgctatggatctgacccaactggagatgttcaacgcggttgccgaagctggcagcataacccaggctgcagcaaaagtgcatcgcgtgccgagcaatctcactacccgtctgcgccagctggaaacagaactgggggttgatctgtttattcgcgagaatcagcgtttacgtctctctcctgccgggcataactttttacgctatagccaacaaattctcgcgttagtggatgaagcgcggagcgttgtcgctggcgatgagccgcaaggtttattttctcttggtagcctggaaagcaccgctgcagtgcgcattccagccacgctggcggaattcaaccgtcgttatcccaaaattcagtttagtctttccaccggcccttccggcactatgctggatggtgtactggagggaaaactgaatgcggcgtttattgatggacccattaaccatactgccatcgacgggataccggtataccgcgaggaactgatgatcgtcacgccacaaggatatgcgccagtaacccgtgccagtcaggttaatggcagtaacatttatgccttccgcgccaattgtagctatcgtcgccacttcgagagctggtttcatgctgacggtgccgctccgggaactatccatgagatggagtcttatcacggaatgttggcctgtgtgatcgcaggagcaggcattgcgcttattccgcgctctatgctggaaagtatgccggggcatcaccaggttgaagcgtggccgttagctgagcaatggcgttggttaacaacctggctggtctggcgtcgtggtgcgaaaacacgtccgctcgaggcatttattcaactgctggatgtgcctgacagcgcaagacagggatatcaatgagctatttttgatagttcttgcggttaatatgctctatatagtgatgttccgatgacttatgactatatggggcaaatatggttacgccagtaagcatcagcaattacatatctcttcctgatgattttcccgtacgtaatattgcaccgcaggtaaaagaagttttaaaggattttattgatgcacttagtacaataatatgtaatgaagagtggcgcacgtctttaaacatcaacagtgccacaaaaaagatatttaataaccttgacaacttaagttatattcagaggacttcttttcggggtaacgacacgctatacaatgaaaaggttcagtttaaactcacttatcccgccaggaatggaagacacaaagaaaatattgaatttcaggtagtaataaatttaagccctatttatttagataattttcgccatgatggagaaattaatattttttgcgctcccaacccaaagcctgtcactatggggcgcgtatttcagaccggcgtcgagcgtgtactctttctgtttctgaatgattttattgaacaatttccaatgatcaaccctggtgttcccatcaaaagagcgcatacaccacatattgaacccctgcctagcgatcaccataccgctgcagattacttacgccagtttgatttgcttgtcctgaattttatctctcgcggtaattttgtcatactcccccgattatggagtaactctgaggttcacagatggttcgtcaataaagatcctaacttgatcaccgccattctcgacataacggacagcgaattaaaagaggatttgttgcaaagcctgatggatagtttaggttctaacaaacatgtactacccgaagtctgcatctgctttttatcccttttagcagaacaagaatctcctcattttcagaacttgtttttatttttcgccaatatgttattgcactatcaccaatttatgaatcccaatgaaagtgatttgaatgacgtgttgatgccagcaagtttaagtgatgataaaattatcaaacatatggcgcgcaggaccctcaaactgtttgtaaaaaatgaaacaccgccaaaagttactcacgaagacctggtgaaaaacaggcctcgctcccctgtcagaccacctatacccgcaaccgccaaaacgccagacctccctgaacgtcattaaaccgtgatgttaccgactctctgacgcgtgaaagaatcagcgtcagagaaacggaaaacgcgatccagatcacaaatgcattgtattcacatcattaaccgttttaagatcatttcatcactttttcgcaactcacccgataatctgttatgacaacaaacactgtttcccgcaaagtggcgtggctacgggtcgttacgctggcagtcgccgccttcatcttcaacaccaccgaatttgtccctgttggcctgctctctgacattgcgcaaagttttcacatgcaaaccgctcaggtcggcatcatgttgaccatttacgcatgggtagtagcgctaatgagtttgccttttatgttaatgaccagtcaggttgaacggcgcaaattactgatctgcctgtttgtggtgtttattgccagccacgtactgagctttttgagctggagctttaccgttctggtgatcagtcgcattggtgtggcttttgcacatgcgattttctggagcattacggcgtctctggcgatccgtatggctccggccgggaagcgagcacaggcattgagtttaattgccaccggtacagcactggcgatggtcttaggtttacctctcgggcgcattgtgggccagtatttcggttggcgaatgaccttcttcgcgattggtattggggcgcttatcacccttttgtgcctgattaagttacttcccttactgcccagtgagcattccggtagtctgaaaagcctcccgctattgttccgccgcccggcattgatgagcatttatttgttaactgtggtggttgtcaccgcccattacacggcatacagctatatcgagccttttgtacaaaacattgcgggattcagcgccaactttgccacggcattactgttattactcggtggtgcgggcattattggcagcgtgattttcggtaaactgggtaatcagtatgcgtctgcgttggtgagtacggcgattgcgctgttgctggtgtgcctggcattgctgttacctgcggcgaacagtgaaatacacctcggggtgctgagtattttctgggggatcgcgatgatgatcatcgggcttggtatgcaggttaaagtgctggcgctggcaccagatgctaccgacgtcgcgatggcgctattctccggcatatttaatattggaatcggggcgggtgcgttggtaggtaatcaggtgagtttgcactggagtatgagcatgattggttatgtgggcgcggtgcctgcttttgccgcgttaatttggagtatcattatatttcgccgctggccagtgacactcgaagaacagacgcaataattgaaaggcccattcgggccttttttaatggtacgttttaatgatttccaggatgccgttaataataaactgcacacccatacataccagcaggaatcccatcagacgggagatcgcttcaatgccacccttgcccaccagccgcataattgcgccggagctgcgtaggcttccccacaaaataaccgccaccaggaaaaagatcagcggcggcgcaaccatcagtacccaatcagcgaaggtactactctgacgcactgtggacgcgctgctaataatcatcgctatggttcccggaccggcagtacttggcattgccagcggcacaaaggcaatattggcactgggttcatcttccagctcttcgctcttgcttttcgcctccggactatcaatcgctttctgttgcggaaagagcatccgaaaaccgataaacgcgacgattaagccgcctgcaattcgcagaccgggaatgctaatgccaaatgtatccatcaccagttgcccggcgtaatacgccaccatcatgatggcaaatacgtacacgctggccatcaagctctgacgattacgttcggcactgttcatgttgcctgccaggccaagaaataacgcgacagttgttaatgggttagctaacggcagcaacaccaccagccccaggccaattgctttaaacaaatctaacattggtggttgttatcctgtgtatctgggttatcagcgaaaagtataaggggtaaacaaggataaagtgtcactctttagctagccttgcatcgcattgaacaaaacttgaaccgatttagcaaaacgtggcatcggtcaattcattcatttgacttatacttgcctgggcaatattatcccctgcaactaattacttgccagggcaactaatgtgaaaagtaccagcgatctgttcaatgaaattattccattgggtcgcttaatccatatggttaatcagaagaaagatcgcctgcttaacgagtatctgtctccgctggatattaccgcggcacagtttaaggtgctctgctctatccgctgcgcggcgtgtattactccggttgaactgaaaaaggtattgagcgtcgacctgggagcactgacccgtatgctggatcgcctggtctgtaaaggctgggtggaaaggttgccgaacccgaatgacaagcgcggcgtactggtaaaacttaccaccggcggcgcggcaatatgtgaacaatgccatcaattagttggccaggacctgcaccaagaattaacaaaaaacctgacggcggacgaagtggcaacacttgagtatttgcttaagaaagtcctgccgtaaacaaaaaagaggtatgacgatgtccagacgcaatactgacgctattaccattcatagcattttggactggatcgaggacaacctggaaagcccactgagtctggagaaagtgagtgagcgtagcggttactccaaatggcacctgcaacggatgtttaaaaaagaaaccggtcatagtttaggccaatacatccgcagccgtaagatgacggaaatcgcgcaaaagctgaaggaaagtaacgagccgatactctatctggcagaacgatatggcttcgagagccaacaaactctgacccgaaccttcaaaaattactttgatgttccgccgcataaataccggatgaccaatatgcagggcgaaagccgctttttacatccattaaatcattacaacagctaattgaaaacgtgacaacgtcactgaggcaatcatgaaaccacttagttccgcaatagcagctgcgcttattctcttttccgcgcagggcgttgcggaacaaaccacgcagccagttgttacttcttgtgccaatgtcgtggttgttcccccaagccaggaacacccaccgtttgatttaaatcacatgggtactggcagtgataagagcgatgcgctcggcgtgccctattataatcaacacgctatgtaatttgttctggccccgacatctcggggcttattaacttcccacctttaccgctttacgccaccgcaagccaaatacattgatatacagcccggtcataatgagcaccgcacctaaaaattgcagacccgttaagcgttcatccaacaatagtgccgcacttgccagtcctactacgggcaccagtaagcttaacggtgcaacccgccaggtttcatagcgtcccagtaacgtcccccagatcccataaccaacaattgtcgccacaaacgccagatacatcagagacaagatggtggtcatatcgatagtaaccagactgtgaatcatggttgcggaaccatcgagaatcaggctggcaacaaagaagggaatgattgggattaaagcgctccagattaccaggctcatcaccgccggacgcgtactgtggctcatgatctttttattgaagatgttgccacacgcccaactaaatgctgccgccagggtcaacataaagccgagcatcgccacatgctgaccgttcagactatcttcgattaacaccagtacgccaaaaatcgctaaggcgatccccgccaattgtttgccatgcagtcgctccccgaaagtaaacgcgccaagcatgatagtaaaaaacgcctgtgcctgtaacaccaggctagccagtccagcaggcataccgaagttaatggcacaaaaaagaaaagcaaactgcgcaaaactgatggttaatccataccccagcagcaaattcagtggtactttcggtcgtgcgacaaaaaagatagccggaaaagcgaccagcataaagcgcaaaccggccagcatcagcggtggcatgttatgaagccccactttgatgaccacaaaatttagcccccatacgaccactaccagtagcgccaacaccccatcttttcggctcattctaccgcctctgaatttcatcttttgtaagcaatcaacttagctgaatttacttttctttaacagttgattcgttagtcgccggttacgacggcattaatgcgcaaataagtcgctatacttcggatttttgccatgctatttctttacatctctaaaacaaaacataacgaaacgcactgccggacagacaaatgaacttatccctacgacgctctaccagcgcccttcttgccagcagcttgttattaaccatcggacgcggcgctacgctgccatttatgaccatttacttgagtcgccagtacagcctgagtgtcgatctaatcggttatgcgatgacaattgcgctcactattggcgtcgtttttagcctcggttttggtatcctggcggataagttcgacaagaaacgctatatgttactggcaattaccgccttcgccagcggttttattgccattactttagtgaataacgtgacgctggttgtgctcttttttgccctcattaactgcgcctattctgtttttgctaccgtgctgaaagcctggtttgccgacaatcttagctccaccagcaaaacgaaaatcttcagtatcaactacaccatgctaaacattggctggaccatcggtccgccgctcggcacgctgttggtaatgcagagcatcaatctgcccttctggctggcagctatctgttccgcgtttcccatgcttttcattcaaatttgggtaaagcgcagcgagaaaatcatcgccacggaaacaggcagtgtctggagcccgaaagttttattacaagataaagcactgttgtggtttacctgctctggttttctggcttcttttgtaagcggcgcatttgctagttgcattagtcaatatgtgatggtgattgctgatggggattttgccgaaaaggtggtcgcggttgttcttccggtgaatgctgccatggtggttacgttgcaatattccgtgggccgccgacttaacccggctaacatccgcgcgctgatgacagcaggcaccctctgtttcgtcatcggtctggtcggttttattttttccggcaacagcctgctattgtggggtatgagtgctgcggtatttactgtcggtgaaatcatttatgcgccgggcgagtatatgttgattgaccatattgcgccgccagaaatgaaagccagctatttttccgcccagtctttaggctggcttggtgccgcgattaacccattagtgagtggcgtagtgctaaccagcctgccgccttccagcctgtttgtcatcttagcgttggtgatcattgctgcgtgggtgctgatgttaaaagggattcgagcaagaccgtgggggcagcccgcgctttgttgatttaagtcgaacacaataaagatttaattcagccttcgtttaggttacctctgctaatatctttctcattgagatgaaaattaaggcaagcgaggaaacacaccacaccataaacggaggcaaataatgctgggtaatatgaatgtttttatggccgtactgggaataattttattttctggttttctggccgcgtatttcagccacaaatgggatgactaatgaacggagataatccctcacctaaccggccccttgttacagttgtgtacaaggggcctgatttttatgacggcgaaaaaaaaccgccagtaaaccggcggtgaatgcttgcatggatagatttgtgttttgcttttacgctaacaggcattttcctgcactgataacgaatcgttgacacagtagcatcagttttctcaatgaatgttaaacggagcttaaactcggttaatcacattttgttcgtcaataaacatgcagcgatttcttccggtttgcttaccctcatacattgcccggtccgctcttccaatgaccacatccagaggctcttcaggaaatgcgcgactcacacctgctgtcacggtaatgttgatatgcccttcagaatgtgtgatggcatggttatcgactaactggcaaattctgacacctgcacgacatgcttcttcatcattagccgctttgacaataatgataaattcttcgcccccgtagcgataaaccgtttcgtaatcacgcgtccaactggctaagtaagttgccagggtgcgtaatactacatcgccgattaaatgcccgtaggtatcattaaccaatttaaatcggtcaatatccaacaacattaaataaagattcagaggctcagcgttgcgtaactgatgatcaaaggattcatcaagaacccgacgacccggcaatcccgtcaaaacatccatattgctacggatcgtcagcaaataaattttgtaatcggttaatgccgcagtaaaagaaagcaacccctcctgaaaggcgtcgaaatgcgcgtcctgccagtgattttcaacaatagccagcattaattcccgaccacagttatgcatatgttgatgggcagaatccattagccgaacgtaaggtaattcatcgttatcgagtggccccagatgatcaatccaccgaccaaactggcacagtccataagaatggttatccgttatttctggcttactggcatctctcgcgaccacgctgtgaaacatactcaccagccactggtagtgggcatcgatagccttattgagatttaacaagatggcatcaatttccgttgtcttcttgatcattgccactcctttttcacagttccttgtgcgcgctattctaacgagagaaaagcaaaattacgtcaatattttcatagaaatccgaagttatgagtcatctctgagataacattgtgatttaaaacaaaatcagcggataaaaaagtgtttaattctgtaaattacctctgcattatcgtaaataaaaggatgacaaatagcataacccaataccctaatggcccagtagttcaggccatcaggctaatttatttttatttctgcaaatgagtgacccgaacgacggccggcgcgcttttcttatccagactgccactaatgttgatcatctggtccggctgaacttctcgtccatcaaagacggccgcaggaataacgacattaatttcaccgctcttatcgcgaaaaacgtaacggtcctctcctttgtgagaaatcaaattaccgcgtagactaacgctagcgccatcgtgcatggtttttgcgaaatcaacggtcattttttttgcatcatcggttccgcgatagccatcttctattgcatgaggcggcggtggcgctgcatcctgttttaaaccgccctggtcatctgccaacgcataaggcatgacaagaaaacttgctaatacaatggcctgaaatttcatactaactccttaattgcgtttggtttgacttattaagtctggttgctatttttataattgccaaataagaatattgccaattgttataaggcatttaaaatcagccaactagctgtcaaatatacagagaatttaactcactaaagttaagaagattgaaaagtcttaaacatattttcagaataatcggatttatatgtttgaaaattattatattggacgagcatacagaaaaagcaaatcacctttacatataaaagcgtggacaaaaaacagtgaacattaatagagataaaattgtacaacttgtagataccgatactattgaaaacctgacatccgcgttgagtcaaagacttatcgcggatcaattacgcttaactaccgccgaaagttgcaccggcggtaagttggctagcgccctgtgtgcagctgaagatacacccaaattttacggtgcaggctttgttactttcaccgatcaggcaaagatgaaaatcctcagcgtaagccagcaatctcttgaacgatattctgcggtgagtgagaaagtggcagcagaaatggcaaccggtgccatagagcgtgcggatgctgatgtcagtattgccattaccggctacggcggaccggagggcggtgaagatggtacgccagcgggtaccgtctggtttgcgtggcatattaaaggccagaactacactgcggttatgcattttgctggcgactgcgaaacggtattagctttagcggtgaggtttgccctcgcccagctgctgcaattactgctataaccaggctggcctggcgatatctcaggccagccattggtggtgtttatatgttcaagccacgatgttgcagcatcggcataatcttaggtgccttaccgcgccattgtcgatacaggcgttccagatcttcgctgttacctctggaaaggatcgcctcgcgaaaacgcagcccattttcacgcgttaatccgccctgctcaacaaaccactgataaccatcatcggccaacatttgcgtccacagataagcgtaataacctgcagcatatccgccaccaaaaatatgggcgaaataactgctgcgatagcgtggcggtatagcaggaagatccatattttccgccaccagcgcccgcaattcaaaatcatcgacatcctgcattgcttcgttttcttccaggcaatgccagcgcatatcgagaagtgcggcgctaagcagttcgctcatctcataccctttgttgaacaggctggcattacgcattttctgttgcagttcgtcaggcattgctgccccgctctgataatgccgggcgtagcgagcgaatacctgcggatgcgttgcccagtgttcgttgatttggctcggaaattcgacaaaatcacgcggcgtgttggtgccggaaagcgtggcataacgctggcgggcaaaaaggccgtgcagcgtatgaccaaattcatggaataaggttatgacatcatcccagagtaacaacgcaggctcaccggcagcgggtttctgataattgcagacgttataaattaccggatgtgttttattaagcgtactttgctcaacaaaattgcccatccatgcaccgccgcttttactatcacgggcgaagaaatcaccgtaaaataacgccagccccacgccattatgatcaaaaatttcccacacacgaacgtcaggatggtagacaggaatatcaaaacgttcgacaaacttaataccgaagagctgattcgcggtccagaatacaccttcatttaacaccgtgtttaattcaaaatatggcttgagctgcgcctcatcaagatcaaatttctcccgccgtacctgttccgcataaaatgcccagtcccacggctgcgcgctaaacccgccctgctgcttatcgataaccgcctgtatggaggctaattcatcgctcgcacgttgacgcgccgctggaacaatttcccgcataaagttaagtgctgcttcaggtgtttttgccatctgatcggcgattttccatgcggcataatgaggaaaaccaagtagtgttgcctgttgtgcacggatctccaccagacgttgaatgatagcgcgggtatcattggcatcatttttttccgctcgcgtccagcccgcaataaacagtttttcacgcgtcgcacgatcgcgcatttcggcaagcgccggttgttgggtggtattcagcagcggaatcagccatttgttatccagacctttctcgcgagccgcctctgccgccagcgcaatctcttgctcactcattcctgccagctgcgcgatatcgttcacaaccagaccgccggatttatttgctgccagtaatcgctggttaaactggctggtcagggtcgcagcttctgtattcagtacttttaattttgctttatcagcttgcgcaagtttggctccggcaaggacaaaacgttgatgaatcacctccaccaggcggatggattcactatcaagccccagggattcacggcgctgccagacagcatctacccgcgcgaataattcaccgttcagatagatatcattagccagttccgccagttcagcggaaaactgctcgtcaagacgctgtaattcatcattggtatgcgccgcagtcatcgcaaaaaagacgctggtaacgcgggtaagtaattctccgctttgttccagtgccagaatagtattgttgaaatcaggcatttgcgggttaagcgcgatggcagcaatttctgcccgcttttgctgcattccctcatcgaatgccgggcgatagtgatgattggcaatttgatcaaaatggggagccagatacggcagtgtgctttgcacaaggaaaggattcattgttgtcattttcttctcctgaacgcgaggtgttccatagcgtaggcttactgataacggagtgcaatcttgcaatccagtattacccgctcttaagcatcccgtgctatgttattgacacacaaaagcgttgaggaacagtgagaagcgcagtgcccagccatcccgatactgctgctttcaccaaatccttagtgcttctttcgtgtttttctattgtcataatggttatctctaaaaaagaggtaagatgcgtactacttactcgccgttattggtattattcagaaaaagtgagtaagactttgcagcaatgtttttgatcctgttcaaataaactaatggcatcagcaacatgctggaaatcaaacgtatgggtaattaatttttctggtttaattaaccctttacttaaccagtcgataacgatcgggaatttatttgcatttaagcgactagagaaaatagagagttcttttccggtaattccttgctgaatcacttcagacggttcactggagaaccccatcaatacaatacgtgccgctggagaagccagcgttacggcctctttcaggatagaaggatgacaagccgcatcgataattaatgtcggcttgatgcctttttcagtgaaaatctcgccaagcggtgtctggctgttattaatcgcccagtcagccccgctctctttcgctttttccagtcgttcatcaatgcgatcggcaacaatcacatttttaacgttatagacgccttttaatacctgaacgatcgtcaggccgattggaccggcaccataaaccagaacggtatcattttcagtcggttgaccatgtccggttacgttagccgcaatggtaaaaggttcgatcattaccgcatattgatcggccactgcttcaggaattttccacgcattttttgccggaaccacggcatattcactgaaaccaccgtcagcgtgcacacctaatacagccagtgtcgtacaaacgttcggtttacctatagagcacggatagcaatgcccacagctgaccaccggatcgacagcaacacgttcaccgactctggcgctttccacgccttcacccactgcatcaatgacgccaaagaattcatgaccaatgacgcgcggatatttcgcaaaaggattatgcccacgataaatatggctatcactaccacaaattccggcaagtttcacttttactcgtacttcacccgcactcggggtgggtatttcacgttcgacaatcgccagttgattcggtttttcaattaatatgcttttcattatcttactccttaccagttccacagcgtgccatcttccagacgtgcgactggtagataagcaggttcatagggatatttcgccgccagcttttcatcgaattcgataccaagacccggtttgtctcccggatgcatatagccgttatcgaaagtccagttgtgcgggaagacttcgagcatttgttcggaataacccatgtattcctggacaccgaaattggggacccacagatcaaagtgcagcgccgcagccatgcagactggactcaaatcggaaggaccgtgactgccagtacgtacctgatacaggctagcaaaatcggcaatccggcgcataccggtaattccgcctgcatgggtcagcgtggtgcggatataatcgatgagttgctcttcaatcagttgtttgcagtcccagatgctgttgaagacttcacccactgcgatgggtgtgacggtatgttggcgaatgagacggaagcattcctggttttccgcaggcgtcgggtcttccatccagaacatgcgataatcttcaatgcttttaccaaagcgcgccgcttcaataggcgttaagcgatggtgcatgtcatgcagcaaatgttcattaaaaccaaacttgttacgtaccgcgtcaaacaatttcggcatgaaatcgaggtatttctccgtgctccacagctgctcttccggccactgtcctttggttgcgggttcataagccagacctttacctttgctcatgccgtaggtggttttcataccagggattccgcactgcacgcggatggctttgaatccaagctcttgatgacgggcataatcatccagagcttcatcaatactgtgaccggtggtatggcaataaaccatcaccccttcacgagacgcgccgccgagtaactggtaaagcggcatgttggcagctttggctttaatatcccacagcgccatatcaaccgcactaatggcgctcatcgtaaccggaccgcgacgccagtaagcacctttatagaaaaactgccagatatcttcgatacggtgcgcatcgcgaccaataagctgcggacaaaggtgatcctgcaaataagaggccacggaaagctcacgtccattgagggtggcatccccaaggcccgtaataccgtcctcagtggtgatttttaatgtgacgaaattacgccccggacaggtaacaaaaacttcagcctttacgatcttcatgttcgattccttgcatcgcttgtcgtgatgcatgaaatctacgcaactgagctactaccatacaagtataaagatcgaaaaaagccggagtgatcacaaaaaaaggcgtatatttgcgctgtgaatggttgacaaaagatgaaatagaataccttttgtcagctgacacttcctcttatcttattgataaaatggatttatgttcttacgtgcgcccccagcccgcaacaatgatcaacatgccgcaaagcgcaatcaacgcacccgtccagtcataaagagtcagtttcacgccatccacaacgcgcagccacatcaacgccgtgcagacataaacgccaccataagccgcgtaaacacgcccactcgccgctggatgcaacgttaacaaccagacaaacagcgccagactaatccccgccggaagcaacagccagatactggcgtttcgttttaaccacaaccagggcagaaagcatccaataatttcacacagcgcagtagcaaaaaatagtaacgttgttttaatcatctttgtctcttattgacatcatgtatagttatagggcgacataatatcatcaatataaacaccctcctggtacgttttgcgtccgcagtggatggtgtagaatcacctttaatcattcatacagggaatgaattatgaaaatcactctcagcaaacgaatcggcctgctcgctattctgctgccttgcgcactggcattgagcacaactgttcatgccgaaactaacaaactggtgattgagtctggcgacagtgcacaaagccgccagcacgccgctatggaaaaagagcaatggaatgacacgcgcaatctgcgccagaaagtgaataaacgcactgaaaaagagtgggataaagccgacgccgcttttgataaccgcgataaatgtgagcaaagcgccaacatcaatgcctactgggagcccaatactttgcgctgcctggaccgtcgaactggccgcgttattaccccctaacctgttattgatttaaggaatgtaaggacacgttatgccaagcgcccacagtgttaagctacgcccgctggagcgtgaagatttacgctatgtacatcaactcgacaataacgccagtgtgatgcgttactggtttgaggaaccctacgaagcctttgttgaactctctgatctgtatgataagcatattcacgatcagagcgaacggcgctttgtggtggaatgtgacggcgaaaaagccggtctggtggagctggtggaaattaaccatgttcatcgccgcgcagaatttcagataattatctccccggagtatcaggggaaaggtctggcaacccgtgccgccaaattagcaatggactatggctttaccgttctcaatctctataagctgtatctgatcgttgataaagagaatgaaaaagcgattcacatttaccgcaagcttggctttagcgttgaaggtgaattgatgcacgagttctttattaatggtcaatatcgtaatgccattcgcatgtgtatattccagcatcagtatctggcagagcacaaaacaccgggtcagactctcctgaagccgaccgcacaataacattaataataatcgatcgtatttttgatggtgtaaacccgttcgacggcgggttttactccttcatcaacaatgattagctgacagtccaccggattagcgtgactgtcatattcacagctctgttttacattaccaacccgttgattattcagtaaagtaaccgctgtgtaatctaattttttgatcggatccgtacttggcgtggcgctgacagataatgttttgtcgttacttttcgtggttttacccagcggataaccctgatcatcatagcgatattccatctgcatttgtttgctgctggctttaatcacgaagccattatcatcggtttcccaactcaccccggcagaaggtaattctgctagctggcattttccctgtaaacgtactctcttctccagcgtctcggcatcacggtaataattggcgtccagtaccagagcgaccacggtattattttccagatccagtaattcgagactatcaaaacagccttcttcgctcaaagtcccagaaacacgtttcgtcacttcaccttgctcatccattaatgtctgagtgaaatcttttaccggaccacgcagcggatcaaaatcgaattcattagagaaactggccatctcaggggtaaaactaagtgttacctctgtgcggtcacatcctgtgaggaatatcgcgagtaagcatggtagtaatttgtatttcacaacagtcaccagagagtagagatgattctcaatcatagtagcaaatacagtactttacacgttaaatgctatgcttaaagaagttatcttcgcgtaaggagcttatgatgaaactcagtacctgctgtgccgcgcttctgctcgccctcgccagtcccgcggtactcgccgcgccgggatcctgtgagcgcatacagagcgatataagtcagcgcattatcaataatggcgtacccgaaagcagcttcacgttaagtattgtacccaatgaccaggttgatcagcctgattcccaggtcgtcggccattgcgctaatgatacgcataaaattctctatacccgcaccaccagcggtaacgtctctgctcccgcgcagtctagccaggatggcgcgcctgccgaaccgcagtaacacattatcgactgaacgccggatatgacaaatccggcgatttgaacatacaacataatcccaccttattactcatacccttctattgatatggattaataattcttaacccaaaatgggtagactccctctattgttagcgcgctaaatattcaatatataaacttttatataacgataaagaacagggagtgagttatgtccaaaaatgaacgaatggtgggcatcagccgcagaacactcgttaaatctaccgcgataggttctctggcgctggctgcaggcggtttttctttgccgtttaccctgcgcaatgcagcagcagcggtacaacaggcccgcgaaaaagtggtctggggtgcctgttccgtcaactgtggtagccgctgtgcacttcgtctacatgttaaagataatgaagtgacctgggtggaaactgacaataccggcagcgatgagtacggcaaccatcaggtacgcgcctgtttgcgcggtcgctccatccgccggcgtattaatcatcccgatcgcttgaattacccaatgaaacgcgtgggcaaacgcggcgaaggcaaattcgaacggattagctgggatgaagccctggatactatcgccagtagcctgaagaaaaccgtcgaacaatatggcaatgaggctgtatatattcagtactctagcgggatcgttggcggcaatatgacccgctctagcccaagtgccagcgcggtcaaacgcctgatgaactgctacggcggtagtctcaaccagtatggctcctacagcactgcgcaaatttcctgtgccatgccctacacctacggcagtaatgatggcaacagcaccacggatattgaaaacagcaagctggtcgtgatgtttggtaacaacccggcagaaacccgcatgagcggtggtggcatcacttatcttcttgaaaaagcgcgcgagaaaagcaacgccaaaatgattgttatcgatccgcgatataccgatacggctgccggtcgtgaagacgaatggctccctattcgcccgggcaccgatgccgcgctggttgcgggtattgcctgggtattgattaacgaaaatctcgttgatcaaccttttctcgataaatactgcgtcggctatgacgaaaaaaccttacccgcagatgcacccaaaaatggtcactataaagcctatattcttggtgaaggtgacgataaaacagcgaaaacgccgcagtgggctagccaaattaccggtatcccggaggaccgtatcatcaaactggcgcgtgaaattggcacagcaaaacccgcttatatctgccagggctgggggccacaacgccaggcaaacggcgaactgactgcacgcgctattgctatgttacctattttgacgggcaatgtcggcatcagcggcggaaatagtggcgcgcgtgaaagcacctataccattaccatagaacgcctgccggtgctggataatccggtcaaaacgagtatctcctgcttcagctggacagatgctatcgatcatggtccgcaaatgacggcaatccgcgacggcgtccgcggcaaagataaactggatgtgcccattaagttcatctggaactacgcgggaaataccctcgttaatcagcattctgacatcaacaaaacgcatgaaattctgcaggacgaaagcaaatgcgaaatgattgtggtcatcgaaaactttatgaccagtagcgcaaaatatgccgacattctgctgccagacctgatgaccgttgagcaggaagatattattcctaacgactacgccggtaacatgggatatctcattttcctccagcctgtcaccagcgaaaaattcgaacgcaaaccgatttactggatcctgagtgaagtcgcgaaacgtcttggacctgacgtctatcaaaagttcacagaaggtcgcacgcaggaacaatggttacaacatctgtacgccaaaatgcttgccaaagatccggcgttaccgtcttacgacgaactgaaaaaaatgggtatctataagcgtaaagatcccaatggccattttgtcgcctacaaagcatttcgtgacgaccccgaggcaaatccacttaaaacgccttccggtaagattgaaatttattccagcaggctggcggaaattgcccgtacctgggaactggaaaaagatgaagtgataagcccattgccagtttatgccagtacctttgaaggctggaactcccctgaacgtagaaccttcccactgcaactgtttggtttccattacaaatcccgtactcacagcacctacggcaatattgatctcctgaaggctgcctgccgtcaggaggtgtggatcaaccctatagatgcgcagaaacgtgggattgccaacggcgatatggtgcgggtgtttaaccatcgtggcgaagttcggctaccagccaaagtaacaccacgtattctccctggagttagcgctatgggccagggagcctggcacgaggccaatatgtctggcgataaaatcgaccatggcggctgtgtgaatacgctaaccactctgcgccctagtccactggcgaagggaaacccgcagcacactaatctggtcgagatcgaaaaaatataacccacgacaaccataaattctggcatgacattttgtttgaaaagcaataagtgagtaatgatgaaaatccataccacagaggcgctcatgaaggctgaaatcagccgtagaagtctgatgaaaacctccgcacttggcagtcttgcgctggcaagcagtgctttcactctgccattttcccaaatggtccgggcggcagaggctccggtagaagagaaagcggtctggagttcctgcaccgttaactgcgggagccgctgtctgttacgtttgcatgtgaaagatgacaccgtgtactgggtggagtctgatacgacaggtgacgacgtctacggtaatcatcaggttcgagcgtgtttacgcgggcgctctatccgccgacggatgaatcatcctgataggttgaaatatcccatgaagcgcgtcggcaagcgcggtgaaggtaaatttgaacggataagttgggacgaagccctggataccatcagtgataatcttcggcggatcctgaaagattacggcaatgaggctgtacatgtcctgtacggaacaggcgtagatggcggaaacatcaccaacagtaacgtcccgtaccgtctgatgaactcttgcggtggttttctcagtcgctatggcagctacagtaccgcacagatcagtgccgcaatgagttatatgttcggtgccaatgatggcaacagcccggatgatatcgccaatacgaaactggtcgttatgttcggaaataacccggcagaaacgcggatgagcggcggtggtgtcacttactacgtcgagcaagcccgcgaacgtagtaacgcacgcatgatcgtcatcgatccacgttataacgacactgctgccgggcgtgaagatgaatggctgcccattcgccctggcaccgatggcgcactggcctgtgcgattgcctgggtactgattactgaaaacatggtcgatcagccatttctcgacaaatattgtgttggttacgatgaaaaaacgctgcccgccaacgcaccacgtaacgcgcattataaagcctatattctgggcgaagggcctgacggcatagctaaaacgccggaatgggcagcaaaaatcaccagcatcccggcagaaaaaattatccagttggcacgagagatcggtagtgcaaaacctgcttatatttgtcagggttgggggccacaacgacattccaacggcgagcaaacatcccgcgctattgccatgctttccgttctcaccggcaacgtcggcataaacggcggcaacagtggcgtacgcgaaggtagctgggatctgggggtagaatggttcccgatgctcgagaatcctgttaaaacgcagatttccgtctttacatggacagatgccatcgaccatggtacggaaatgaccgcgacccgtgatggtgttcgtggaaaagaaaaactggatgtccccatcaagtttttatggtgctacgccagtaacacattgatcaatcaacatggcgacatcaatcacacccatgaggtgcttcaggatgacagcaagtgcgagatgattgttggcattgaccacttcatgacggccagcgctaagtattgcgatatcctgttgcccgacctgatgccaacagagcaagaagaccttatctctcatgaatctgcagggaatatgggctatgtgatcctcgcccaacccgcaaccagtgcaaaatttgaacgcaaacccatctactggatgctgagtgaagtcgccaaacgcttaggaccagacgtttatcaaacctttactgaaggtcgcagtcagcatgaatggatcaaatatctccatgcgaaaacgaaggaacgtaaccctgagatgcccgactacgaggagatgaaaacgaccgggatctttaagaaaaaatgcccggaagaacactacgtcgctttccgcgcattccgtgaagatccacaggcaaacccgttgaaaacacctagcgggaaaatcgaaatttattctgaacgactggcgaagattgcagatacctgggaattgaaaaaagatgaaattattcatccccttcctgcgtataccccaggttttgatggctgggacgatcccctgcggaaaacctatccactgcagttaacgggcttccattacaaagcgcgtacccactccagctacggcaatattgatgtgttacagcaggcctgcccacaagaggtgtggatcaaccccattgatgctcaggcacgcggtatccgtcatggcgataccgtgcgggtatttaacaataatggagaaatgctgattgccgcaaaagtgactccgcgtattctgcctggcgttaccgccatcgggcaaggtgcgtggcttaaagcggatatgtttggtgaccgggtcgatcacggcggcagtatcaatattctgacctctcaccgccctagtccgctggcaaagggaaacccgagccacagcaatcttgtccagatcgaaaaggtttaaggagtagcccatgaccacacaatatggattttttatcgattccagccgctgtactggctgtaaaacctgcgaactggcgtgcaaagattttaaagatcttggcccggaagtcagtttccgccgtatttatgaatacgctggcggcgactggcaggaagataatggcgtctggcaccagaacgtgttcgcttattatctctccatctcctgtaaccattgcgatgaccccgcatgtacaaaagtctgccccagcggcgcaatgcataagcgtgaagatggctttgtggtggttgatgaagatgtttgtatcggctgccgctactgccacatggcttgtccgtacggcgcgccacagtacaatgctgaaaaagggcacatgacgaagtgcgatggttgttatagccgcgtcgccgaggggaaacaacccatatgtgtcgaatcctgcccgctgcgtgcacttgagttcggtccaattgaagagctgcgccagaagcacggcactcttgctgccgtcgcgccactgccgcgcgcgcatttcacaaaacccaatatcgttatcaaacctaacgccaacagccgcccgaccggcgataccactggttatctggctaatccggaggaagtgtaaaatgggaaatggatggcatgagtggccactggttatctttaccgtattgggtcaatgcgtagtaggcgcgctgattgttagcggaattggctggttcgccgccaaaaatgacgcagaccgtcagcgtattgtccgtggcatgtttttcctctggctgttgatgggcgtcgggtttattgcctctgtcatgcacctgggaagcccactgcgggcgtttaactccctgaatcgaatcggagcttctggtctgagtaacgagattgctgccggttccatattttttgccgttggcggattatggtggctggtggcagtcatcggtaaaatgccgcaagcgttggggaaactctggttacttttcagcatggcgctcggcgtcattttcgtctggatgatgacctgcgtgtatcaaatcgacaccgtgccaacctggcataacggttacactacgctggctttcttcctgacggtattgttgagcggtccaatacttgctgccgcaattctgcgggcagctcgcgttacatttaataccacaccatttgccatcattagcgttctggcgctgatcgcttgtgccggggtgattgtgctgcaaggtttgtctctggcgtctattcacagttccgtgcaacaagccagcgcactggtaccagattacgcctccttacaggtctggcgtgtggtattgttatgcgcaggtcttggatgctggctttgcccgctcattcgtcgccgtgaacctcacgttgccggacttattctggggctaatcctcatacttggcggtgagatgatcgggcgtgtgctcttttatggcctgcacatgacagtaggaatggctattgcaggttaacaaattggtgcggggcaacccgcacatttcaggatgttaggaatgacccattttagtcagcaagataatttttctgtcgcggcgcgcgtgttgggcgcgctgttttattacgctccagagagtgcggaagccgcacctctggttgcggtactcaccagtgacggctgggaaactcagtggcctctaccagaagcgagtttagcgccgctggtgacggcttttcagacacagtgtgaagagactcacgcccaggcctggcagcgtttgtttgtcggcccgtgggcactgccgtctccgccgtgggggagcgtctggctggatcgcgaatctgtgctgtttggcgatagtacattggcacttcgtcagtggatgcgcgagaaaggcattcagtttgaaatgaagcaaaacgaaccggaagatcattttggtagtctgctgttgatggctgcgtggttggcggagaatggtcgccagacagaatgcgaagaattgctggcatggcacctttttccgtggagtacacgttttcttgatgtttttatcgaaaaagcagaacaccctttctaccgtgcactgggtgaactggctcgcttaacgctggcgcaatggcaaagtcaactgttaattcctgtcgcggttaaaccgctgtttcgataagatcaccgtaatattgccggatggtgacgattacgcgcaatccggcaataataggttacagtgtcacgtttttttatctcttaaagcacgcactgcttttgcggctggcctcttttgccgcaaaatagtcgcccgtgtttcattgcccatttctgctcatgcatcatctacacatctatccggatctgcgcactatgttccaccgtctgcttatcgcaacagtcgtcggtattctcgcggcctttgccgttgccgggtttcgtcatgcgatgctgctactggagtggttgttcctcaataatgactccggcagtctggtcaatgcagcgacaaacctttccccctggcgacggttgctaactccggcgctcggcggactggcggcgggtttgttgctgatgggctggcagaaatttacccaacaacgccctcatgcgccgaccgattatatggaagcgttgcaaaccgatggacagttcgattacgcagcaagcctggttaaaagccttgcctctctgctggtagtaaccagcggcagtgcaattggtcgcgaaggtgcgatgattcttttagctgcccttgccgcctcctgttttgcccaacgttttacgccacgccaggagtggaaattatggatcgcctgtggggccgcggcgggaatggctgcggcctatcgtgccccgcttgctggcagtttatttatagccgaagtgctgtttggcactatgatgttggcctctctcggcccggtgattatttccgccgtcgtggcattgctggttagcaatctgattaatcatagcgacgcgttactctacaacgtacaactcagtgtgacggttcaggctcgtgactatgcgctgattatcagtacaggtgtgctggcaggtctgtgcggaccactgttgttaacgttaatgaacgcctgtcatcgtggatttgtgagtctcaaacttgcgccgccctggcaactggcactaggcgggttgatcgtgggtctgctttccctgttcacacctgcagtgtggggcaacggctatagcaccgtacaatcctttttaaccgccccaccactgttaatgatcattgccgggatcttcctttgtaaactgtgtgccgtgctggcgagtagcggttccggcgcacccggtggggtctttacaccgacgctatttatcggtcttgccattggcatgttgtatggtcgtagcctgggattatggttccctgatggcgaagaaattacacttttactcggattgaccgggatggcgacactgttggcggcgaccacgcacgcgccgattatgagcacgttgatgatatgtgaaatgaccggggagtatcagctactccccggtttattgattgcctgcgtaattgcgagcgtaattagccggacgttacaccgtgactctatctaccgccagcacactgcgcagcatagctaagcggatgtattgccccagttcacgctgttcggcgcgcggcagataaggcagttcaccaatgagcggtgccggaagttttttacccagcacatcaatgatttccgcataatgcgccagtcctgggttgattcggttagccacccagccaatgagcggcagcccgtcgttggcgatcgcctgagctgttagcagtgcatggttaatgcaaccttcctgaataccgacaaccatcaacaccggcagttgttcctgcactacccattcagagagtggacgcaaatcattcatcagactgcgccagccgccagtcccttctaccacgacatgatcgactttttcggtcaggtttgccaggccgttactaatgagggtgtaattgattgggcaactgtgcgccacgctactttcttcttcgcttaacgcgataggattaactgcttcataaggcagttcgatggtactaacactctgcaacaccagggcatctttattacgcagcccttcgggtgtctctttgctccccttcgctacgggtttatatcccgcaaccgtttttccctgggaggctaacgcttgtagcaatgcgcgggaaaccaccgttttccctacagaagtgtctgtaccggtaataaagaaacgcttcagcatcactaactccaccgttatgcttcacaaatataaaccaggaaaataattaaccttgaaagtctaagttatgctttcctggcccaaattgagatagcgcaaattttggtagaacagttaaaaaatgttaaccctgcaacagacgaatcaacaaagaaccgttatacatcgcgtcttttaccagtgcagcgcctgccatcgtgccctggttagaaaactgagtactctcaacgctgatgtgctgactatacgcaggaagggcctgctgacggatgctgtcactgatgaccgggaagaggatatctgccgctttacttaacggactgccaatcagtattttttgtgggttaaataaattcaccatgatggcaagaatgcgcccgacatgcgcgcccaccccggtaatgatgtcttttgccagtagatcgccgcgcaatgccgcctgacacaaactgtccacggttaacggttgtccatgtaacatgctgctcatggattgattaagacgcagctgtgccagctcaagaatactgtccacgctggcgatggtttcgaggcagccgtgattcccgcaataacagcgtttcccatacgggtcgacctgtgtgtggcctatttccacgagactactgctgcctgcgtgtagcagatgaccatcggtaatgacgcccgcccccacgttgtgatcgataaccacctgaatcacatcgcgcgccccgcgactggcaccaaacaaggcctctgccatcgtccatgcgctgatatcatgctgaatataaaccggaacgccggtatgctgctccagcgcctcgccgagcggcatctcttttacatcctcgtagaacggcatgcgatgtacaataccattttccgtatcaataattcccggcaaggttatggcaatgctagttagacgctcaagttttttctggtggcggataaaaaactgatcgatatgggaaataatacgatccagcaatggcaagtcatcttttaacgccagttcctggctctcttccaccaccagtttgctgctcagatcgcgcagagcaaggaaaatctccccgcgactaatgcgcagagaaagatagtgccaggcttcagtttcaaccaccagccccaccgccggacggccacggttccccgcttctttgatttccagctcttgcaccaggtgtgcttcgagcatctcacggacaattttagtgatactggcaggagccagttgcgccagacgggaaagatcgatacggctgactggaccaagctgatcaatcaggcgataaaccgcgcccgcgttggtctgctttatttgatcaatgtgcccaggctggttttcagcaaccaccgcatactccctatattttcgcgctccgaaataatctgtaggctatggtgaagcacttcaatacgtgtcgtcaaatttttacttaggcatgtgattaacagcacatttttcgggctttttcgctgaaatttccctcacctgagagcattcagcagatgaatacgaaagttacgcgcagccggactttgttcatgatgtttcggccagaccaaccacatttcagaaaccgcatcctcttcagcaatcggcacccagcgcatttcgttgagctgaacacgtttaaaactcgcaggcaaaatactaacacccagaccggcggaaaccagaccgatgatggtcattgcctcgcccacctcctgagtgatgacgggcgtcaaatggtaacgtcgcatcagcccgagaatatcgtcatacagccctgtcccgacgtgcggatcaaaaaagacaaagggttctttcgccagttcagccagcgttacattcgggttatttgccaggggatgatcgtgcgggatcatcgccataagcggttcatggacgatgactgcgtgttcaaggctctccggtaacgctgtgttacgcagcaatcccatatccagcgttccttcaatgagcggagcgatttgctcgcgagtgttcatttcgcgggtttgtaaatggacatcaggataatcacggcgaaacaggcttaacgtatcggacaccgcccgaataaaaggagcgctgctagtaaaaccaatgcgcaactcccccgcttcaccctgatgcagcctttcagcgcgagcggcagcgtcatccaccatagacaggatttgccgactatctgcaagaaactgttttcctgctgccgtcagcaatacactgcgattggttcgtgccagcagtcgggcaccaatttgttgctccagcgcctgaatctgctgacttagcggcggttggctaatattcaggcgggcagcggcgcgcccgaaatgcagctcttccgcaacagcaacaaagtaacgcagatgacgaagttcaatattcatatttaaaacatcttatttgagattattaatatattagacagaacaattcgattttcctaccctatgtataagcctgatctacaggcatatttagcaaggatttcaagtgagccgtactacaactgttgatggcgctccggcaagcgacactgacaagcaaagcatttctcagccaaatcaatttattaaacgcggtacgccgcaatttatgcgcgtcaccctggcgctgttctctgccggactggcaacatttgcacttctctattgtgtgcagcctatccttccggtgcttagccaggagtttggcttaacccccgcgaacagtagtattagtctgtccatttccacggcgatgttggctattggtttgctgtttactggcccgctatccgatgccattggtcgcaaaccagtgatggtcacggcgctactgttggcctccatttgtacgttacttagcacaatgatgaccagctggcacggcattttgattatgcgcgccttgattgggcttagcttaagtggcgtggcagctgttggcatgacttatcttagcgaggaaatccatcccagtttcgtggcctttagtatggggttgtatatcagcggcaacagtattggcggcatgagcggacgcttaattagcggtgtcttcacggactttttcaactggcgaattgctctggcggcaatcggttgtttcgcgctggccagcgcgttgatgttctggaaaatcctccctgaaagtcgccattttcgcccgactagcctgcgccctaagacgttgtttatcaactttcgtctgcactggcgtgaccggggattaccgttattgttcgcagaaggctttttgctgatggggagcttcgtcacgctgtttaattacatcggctatcggttgatgctctccccctggcatgtcagtcaggccgtggttggcttattaagcctggcttatttgaccggtacatggagcagtcccaaagccggaaccatgaccacccgctatgggcgtggtccagtgatgttgtttagcacgggggttatgctgtttggtttactgatgaccttattcagcagcctgtggctgatctttgccggaatgttactcttcagtgcaggattcttcgcagcccacagtgtagccagcagctggatcggcccccgcgcaaaacgcgctaaaggccaggcctccagcctgtatctgttcagttactatctggggagcagtattgccgggacgctgggtggtgttttctggcataactatggctggaacggcgtcggcgcatttattgctctgatgctggtcattgctctgctggtcgggacgcgtttgcatcgtcgtctgcacgcctgaaaaataagtccggactgcggtaaatacccgtccggacttattgccagctcaaaccaacgttaatagccatcctaaaatagacgaagcgccagccaattcccgcagcgcgtctagcgtcatcaggattataagtacccaaataaacggattcattttgctgtgtgtcatttattactgatgcgcagttattctactgctttgtaagtagtaaaatagttaacccgatcaagactactattattggtagctaaatttcccttaagtcacaatacgttattatcaacgctgtaatttattcagcgtttgtacatatcgttacacgctgaaaccaaccactcacggaagtctgccattcccagggatatagttatttcaacggccccgcagtggggttaaatgaaaaaacaaattgagggtatgacaatgaaaaaagtattagctctggttgttgccgctgctatgggtctgtcttctgccgcctttgctgcagagactacgaccacacctgctccgactgcgacgaccaccaaagcagcgccggcgaaaactacacatcataaaaaacagcataaagcagcacctgcccagaaagcgcaggcggctaaaaagcatcataaaaatacgaaagctgaacagaaagcccctgaacaaaaagcgcaggcagcgaagaaacacgccaagaaacacagccatcagcaaccggcaaaacctgctgcacaacccgcagcgtaagttttcaacagtaatgctggcgcgccccctcgcgcctgaaaattacggtgctaagcgggtaacgtttagcaccgcctttagcggagggtagtatggtgggccgttatcgctttgagttcattctgatcatccttattttatgcgcactgattaccgcccgtttttatctttcctgattgtagttatctgattttactcccactttcatcccgtcccgtctatagtatttatgagggtttgcttttaataatcataattacccaccagagtgtgatatgcgtacaaccattgctgtagtgttgggtgcaattagtttgacgtctgcttttgtgtttgcagataaaccagacgttgccagaagcgcaaacgatgaggtcagcaccctgttttttggtcatgatgatcgtgtgccagtgaatgacacgacccaaagtccgtgggatgcggttgggcaactggaaacggccagcggcaatttatgtacggcgacgctgattgcacccaatctggcattaacggcaggacactgtttattgacacctccaaagggtaaagccgataaagcagtggcgctgcgttttgtgagtaataaaggtctttggcgctatgagatccacgacatagaaggccgcgttgatccgacactgggaaagcggttaaaagcagatggggatggttggattgtacctcccgcagccgcgccgtgggacttcggattgattgtgctacgtaatcccccttctggcattacgccgttgccgttatttgagggagataaagccgcgcttaccgccgcattaaaagcggcaggtcgtaaagtgactcaggcaggctaccctgaagatcatctcgatacgttgtacagtcatcaaaactgtgaagtgactggctgggcgcaaacgagcgtgatgagtcatcagtgcgataccttgccgggtgacagcggtagccctctgatgttgcataccgatgacggctggcaattaattggggtgcaaagtagcgctcctgccgcgaaagatcgctggcgcgccgataaccgggccatttctgttaccggttttcgcgacaagctggatcaactgagccaaaaataatgttcaaacgctgcccgacagcgcgggcagcgtcttcatcaggcaagtttcaccatgatcattccagccaacagcaagaccaggccaatccagcctttacgatttaaccgttgaccaaacaagatccaacctgcggctaacgtggcggcaataccaaacccgccccacaatgcataagcgacagacaagtcgatccctttaacggcttgagaaagcgcactaaaggcagccagcaccgccgccagggagagcaagccaaatattttgcgacgaaagccgtcagaaaatttcaaaaagacgttagcaacgatttccagcacgattgccaatgccagccaggcggcgtgaacccattcaaactgcgccatggttcacctccagttcaggtttacgcgctttacgggtaccactttttatcaacacaatcccggcgaccagggtggttaacccggcaattttcatcaggcttaaactttcgtcgaataacaaaacgctaaacaaggtaataaataaaataccgataccttcccacagcgcataagctacgcctaaggcgatttttttaacggcgaaagagagaaatatatagctcagagaaatcatcaccagcattaaaataaagccgccatttccctcactgacgctcgcccatttcatactcagcgtaccggtaatttctgtagcaatagccagacctaataaaatccaataaatatacattgtccttctcctgcaagagaattattttaattttcgcttaattcagcgaaaccaaagtaaagtggtcaagccccgcgcatagcgcaagctttggcagaagaaaggactaaagcgcgttgcgccagtgctgctcacctacgagcaagatagtggatgaggtacgaagatgggtaaatgtagaaaataacgtcctgaacaaattgtccataatattacaattatccgcagtgttgcttctcgtcatcgcggatgataattgtcctcggtagttgaacacgcctgatttgtatcatagcttaagaattaactcaaaatattttcacttctttacctgagcggtttgattttcgttatgatgacggagcgaaaaagacattattattagcaaaggaagaaaaaacggggacaagcatggcaaagccgatcatcacgctcaatggcctaaaaatcgtcattatgttgggaatgctggtcattattctctgcggtatccgttttgccgccgagatcatcgtgccgtttattctcgcattatttattgctgttattcttaacccgctggtgcaacacatggtccgctggcgtgtgccgcgtgtactggcggtgagcattttgatgaccatcatcgtgatggcgatggtgttgctattagcttatctgggttccgcgctcaacgagttgacgcggacgttaccgcaatatcgcaactctattatgacgccgctgcaagcgcttgaaccgttgttgcaacgcgtagggattgacgtcagtgttgaccagctggcgcattatattgatccgaacgcggcgatgacgttgctcaccaacttattgacgcagttatctaatgccatgagtagtatatttttattgctgctgacggtgctgtttatgctgctcgaagtgccacaattgcccggaaaatttcagcaaatgatggcgcgtccggttgaagggatggcggcgattcaacgtgcgattgacagtgtttctcattatctggtgctgaaaacagccatcagcatcatcaccggcctggtcgcctgggcgatgctcgccgcactcgatgttcgcttcgcttttgtctggggattgctggcctttgcgcttaattacatcccgaatattggtagtgtcctcgcggcaatcccccctatcgctcaggtactggtgtttaatggcttctacgaagcgttgctggtgctggcgggatatctgctgattaatctggtcttcggcaatattctggagccgcgtatcatggggcgtgggctggggctttccacattggtggtatttttgagcttgattttttggggatggttgttaggaccggtgggtatgctgctttccgtgccgttgacaattattgtcaaaattgcgcttgaacaaacagcgggaggtcaaagcatcgccgttctgttaagcgatctcaataaagagtgacggcctcagcagaggccgtcagggttacagagctttcaggattgcatccacgctggctttggcgtcaccaaacagcatgtgggtgttttccttgaagaacagcgggttttgcacaccagcatagccagtgttcatgctacgtttaaagacaatcacgttctgcgctttccacacttccagcacaggcataccagcaatcggactcttcggatcatcctgcgccgccgggttaaccgtatcgttagcaccaatcaccagtacggtatcggtatcagcaaagtcatcattgatctcgtccatttccagcacgatgtcatacggtacttttgcttcagccagcaatacgttcatatgtccaggcaaacgccccgcgaccgggtggataccgaaacgcacattaataccacgagcgcgcaatttctcagtaatttcagcgacaggatattgcgcctgcgcgactgccatgccgtaccccggagtaatgatcacactatgggagtttttcagcagttccgctgtctcttctgcggtgatttcgcggtgctcacccacttcctgatcatcgccagtagaagagccgtcggtgccgaaaccacccgcaataacgctgataaaggaacggttcatcgccttacacataatgtaagaaaggatagccccgctagaaccgaccagcgcaccggtcacaatcagcaggtcgttgctgagcataaagcccgcagccgcagccgcccagccggagtagctgttcagcatgctcaccaccactggcatatctgcaccaccgatggaggcgactaaatgccagccgaataccagcgcaattgcggtcattatcagcaatgccagcacttgcaggccgacgctgtccgtgcgaacaaatacaatcagcagcaggaaggaaacgaccagagccgccaggttcattttgtgacggtttggcagcatcaatggtttagagctaatcttgccacacagtttgccgaacgccaccacgctacccgtgaacgttaccgccccgatgaagataccgaggaacacttccgtcaggtgaatattgaccagaatcggtgccattcccgcgtcatgatgcagatagctgttaaagccaaccagcactgccgccagacccacgaagctatgcaggatcgccaccagttctggcatttcggtcatttcaactttcttcgccagacggataccaattgccccaccaatgaccatcgccagcaagatccagccaacattacccgtatccggtccaaaaatggttgcgattaacgcaatcgccatcccggcgataccgaagttgttaccctggcgagacgtttcatgtttgctaagaccggccagactgaagataaacaggatcgcggcaacaatgtatgcagctgtaactaatcctccagacatatgttaccccttaatttttgcggaacattttcagcatgcgctgagtcacggtgaagccaccgaaaatattaatgctggctataagcaccgcgataaaactaaggaagctaacccagccgccctggccaatctgcaacagtgctccgacaacaataatcccactaatcgcgttggtgacgctcatcaacggtgtatgcagcgcgtggcttacattccacaccacgtaataaccgacaacgcaggccagcgcgaaaacggtgaagtgcccaaggaattctttcggcgcaacgcttgccatccagccaaaaagaatgattgccagcgccatcaacgcgtatttacgccacggactgcaggtacatttttcctcagttttcacttccggtgccgctttttgtgccgcctgcggctgagcacttacctgaatcggcggtgccggccaggtaatttcgcccgcacggatcacggtcacgccgcgaatcaccacatcatcaaaatcaacagtgatattgccgtctttctctttgcacaacagtttcagcagattaacgaggtttgtgccgtaaagctgactggattgcgtcggcagacggcccggaagatcggtataaccaatcactttgacaccattttccgtagtgaagatttcacccggcacggtgtattcacagttgccgccgttttgggctgccaggtcgacaatcacactgcccgccttcatggagtcaaccatttcacgggtaattagcttcggcgctggtttgcctggaataagcgcggtggtgacaatgatatcgacctcttttgcctgggcggcaaagagttccatttccgctttgatgaacgcgtcgctcatcactttggcatagccatcgccgctgccagcttcctctttaaaatccagctcgaggaattccgcgcccatactttgaacttgttctttcacttccgggcgggtgtcgaatgcacgcacaatcgcgccgagactgtttgctgcgccaatggcggccagacctgcaacacccgcaccaatcaccatcacttttgccggtggcactttcccggccgcagtaatttgcccggtaaagaagcgcccaaattcatgtgccgcttcaacaatggcgcgataaccggcgatgttcgccatgctgcttagtgcgtccaggctttgtgcgcgactgatacgcggcacagagtccatcgccatcacggtcacgttacgttccgcaagtttttgcattaattccggattctgcgcaggccagataaaactcaccagcgttgtcccaggattcagtaacgcaatttcatcatctaacggcgcattgaccttcagaatgatctcactctgccagacgctattcccttctacaatttcagcgcccgcttgcacaaacgctttatcgtcaaaacttgccagttgacccgcgccgctctctaccgcgacggtaaaacccagtttcagcagctgttccactgtttttggcgttgctgcaacacgggtttcattggttaaccgttctcttggtatgccaattcgcatgatattcccttccatcggttttattgatgatggtttgcctgtgtcaggagccacacaagctgctcatgtacgagctaaatgttactccgttaaaataaattagtaacaaacgccctataacgtactgaaaattatgcctgtgatctagcgccaaaaatcagtatttcggcgtgaactcgcaaaatattaacgattcagccgtgatagtgggataaacaccttagaacgccggataaagactgataattgtcttcgacggtcgggtaaaacgagacatcgccccggcacgaatcactacttaacattaaattaacttatacaattcagttgcttcagtagtaatgatgctgatacggctgttttttaagcatagacggtcatttgagcaggattaaaattggcttaaggaatgtgatatgaaaaatgacgcagacagttacaccgtttaaatgcaataatcagccacgtttctcgttaataacaataccagtacctggtttgcgcaaggcgaaggattatttttatgaagcttaagaacaccctcctggcgagcgcactgctttctgctatggcattctccgttaacgcagcaacagaactgacaccggagcaagcggcagcggttaaaccttttgaccgtatagtggttaccggtcgttttaatgctattggcgaagcggtgaaagccgtttctcgtcgcgcagataaagaaggtgccgcctctttttatgttgtcgacacttctgattttggtaacagcggtaactggcgtgtggtcgctgacctctataaagccgatgctgaaaaagcagaagaaacaagtaatcgcgtaattaacggtgttgtcgaactgccgaaagatcaggctgttctgattgaaccgtttgacacggtcaccgtccagggcttctatcgtagccagccagaagtcaatgatgccatcaccaaagcggcaaaagcgaaaggtgcctactctttctacatcgttcgtcaaatcgatgccaaccagggcggcaaccagcgtattactgcattcatctataaaaaagatgctaagaaacgtatcgtccagagcccggatgtgatcccggcagattccgaagcaggacgtgcagctctggctgccggtggcgaagccgcgaagaaagttgagatcccgggtgttgcgactaccgcaagtccaagttctgaagtcggtcgcttctttgaaacccagagtagtaaaggcgggcgttacaccgtcacgctcccggatggcactaaagtcgaagaactgaacaaagcgaccgcagcgatgatggtcccgttcgacagcatcaaattctctggcaactacggcaacatgaccgaagtctcctatcaggttgcgaaacgtgccgcgaagaaaggtgctaagtattaccacatcacccgccagtggcaggaacgtggtaataacctgaccgtcagcgcagatctgtataaataactattcagttactcctataaggcggcttgatgccgcctttcgcatttttagtcacaaatttccccgcgaccattgcatgcagacacatctcttcgtaaaatcccgcgcttcagtggcaaactccatttttatgcgttttgccctaatatttattcttcttatcacgttttaatcactggatatcgatggaaaagaaactgggactgagcgcactcaccgcgctggtattaagcagtatgctgggcgcgggtgttttcagtctgccgcaaaatatggcggcagttgccagcccggcagcactgctcatcggctggggtattactggcgctggcattttattgctggcctttgccatgctgatcctcacgcgcattcgtcccgaacttgacggcggtatctttacctatgcccgcgaagggtttggcgagctaatcggcttttgttccgcatggggatactggctgtgcgcagtcatcgccaacgtctcctatctggtgatcgttttttccgcgttaagcttttttacggacacgccggaattgcgcctgtttggcgatggtaatacctggcaaagcatagtcggtgcaagcgctttattgtggattgttcactttttgatcctgcgcggggtgcaaaccgctgccagcattaacctggtggcgacactggcaaaattgttgccgctgggtctgtttgttgtgctggcgatgatgatgttcaaactggataccttcaagctcgacttcaccggacttgcacttggcgtacccgtttgggaacaggtgaaaaacaccatgctgatcaccctgtgggttttcattggtgtggaaggtgccgtggttgtttctgcgcgtgcgcgtaataaacgtgatgttggcaaagcgacactgctggcggttctctccgctctgggcgtttacttgctggtaacgctgcttagcctgggtgtggtggcacgtcctgaactggctgaaattcgtaacccgagtatggccggtctgatggtggaaatgatgggaccatggggcgaaatcatcatcgctgccggtttgatcgtttccgtttgcggcgcgtacttaagctggaccatcatggcagcagaagtaccgttcctggccgccactcataaagcattcccgcgcatttttgcgcgccagaacgcacaagctgcgccatccgccagtctgtggttgaccaacatctgcgtgcaaatttgtctggtactcatctggctgaccggttccgattacaacacgttgctgaccatcgccagtgaaatgattctggtgccctatttcctggtcggcgcgttcttgctgaaaatcgcaacccgtccactgcataaagcggtaggtgtcggtgcctgcatttatggcttatggttattgtacgcctctggtccaatgcacttgctgttatccgttgttctgtatgcaccggggctgctggttttcctgtacgcgcgcaaaacgcatacccatgataatgtactgaaccgtcaggaaatggtgctgattggcatgctgttaattgccagtgttccggcgacctggatgctggtgggataacgttcatcccatcgttggatagcaaaggagataacgatgggtaaaacccagcccttgccaatattaattactggcggaggtcgtcgcatcggcctcgccctcgcatggcatttcattaatcaaaagcaaccggtgattgtcagctatcggacacactatccagccattgatggactgattaatgcaggtgcgcagtgtattcaggctgattttagcaccaacgacggtgtgatggcgtttgccgatgaagtactaaaaagcacccatggtctgcgtgctattttgcataacgccagtgcgtggatggcggaaaaaccgggtgcgccactggccgacgtactggcttgcatgatgcagatccacgttaataccccatacctgctcaaccatgcgctggaaagattactgcgtgggcacggacacgccgccagcgatatcattcactttaccgattatgtggtggagcgcggtagcgacaaacatattgcgtatgctgcaagcaaagcggcactggataatatgacccgcagctttgcccgcaagctggcaccggaagtgaaagtgaattctattgcgccaagcctgatcctgtttaatgaacatgatgatgccgaatatcgacaacaggcgctgaataaaagtctgatgaaaaccgcgcctggcgagaaagaagtgatcgacctggtcgattacttacttaccagttgctttgtcaccggacgcagtttcccacttgatggcggtcgtcatctgcgttaatgcagctttatccagcatataatcaacacccatgcgcttatcccccaacacgcaacagaaccaacaaaagcggcgggcaagcgcatcattccggtgaaataccacaggctcaccaggtaaacaaaatagggaataatgctccacatactaaaaatgatggttgcgcgtaaggcttcaatgccgcgttcgctggcaacaatataatgcgcgataagcgcaaaggtcgggaaaagtggaatcagcccggcgatataataatttttcgtttttgctaaaacaccaatcaacagcactaccagcgcaccgagcgcggctttgattaccagccccatctttttaccttaacacttccataacaagtcatcagtagaatacctgatgaaaacttgtttagaaacgattgatagtaagtaaaaacagcgcggtgtattgtgacgtttttatatctaccgtgaatgttatgaacactatcgtatttgtggaagatgatgcggaagtcggtagtctgattgccgcgtacctggcaaaacatgatatgcaggttaccgtagagccgcgcggcgaccaggccgaagaaaccattttgcgagaaaatccggatttggtgttactcgacatcatgctaccaggcaaggacggcatgaccatttgtcgtgatttacgcgcaaagtggtctggaccgattgttcttctaacctctctcgatagcgatatgaaccacatcctggcactggaaatgggtgcctgcgactatattctcaaaacgacgccccctgctgttttgctagcgcgtttacgtttgcatttgcgtcagaatgagcaagccacactgaccaaaggtcttcaggaaacgtctctgactccctacaaagccctgcatttcggcacgttgaccatcgatcccatcaaccgcgtagtcaccctggctaacactgaaatcagcctcagcacagctgatttcgaattattgtgggaattagctacccatgccgggcaaatcatggaccgcgatgcattgctgaaaaatttacgcggcgtcagttatgacggactggatcgtagcgtggacgtggctattagccggttaagaaaaaaactgctcgataacgccgcagaaccttatcgcattaaaactgtgcgtaacaaaggctatctttttgcgcctcatgcatgggaataagcgatgaaaaaactgtttatccagttttacctgttattgtttgtctgcttccttgtgatgtctctgctggttgggctggtgtacaaatttaccgccgaacgcgcgggcaaacagagcctggatgatttgatgaacagtagcctgtatctgatgcgcagcgaattgcgtgagatccccccacacgactggggtaaaactctgaaagagatggatttaaatctctctttcgatctgcgtgtcgagccactgagtaaataccatcttgatgatatttccatgcaccgactgcgtggcggcgaaattgtcgccctggacgatcagtacacgtttttgcagcgtatcccgcgcagccactacgtgctggcagttggtcctgttccttatctttattatctccatcagatgcgattgctggatatcgccctgatcgcttttattgctatttccctcgcctttccggtgtttatctggatgcgtccgcactggcaggatatgttaaaactggaagcagcggcgcaacgatttggcgatgggcatctcaatgaacgtatccactttgatgagggtagcagctttgaacgacttggcgtcgcatttaaccagatggcggacaatatcaacgccttaattgccagcaaaaaacagcttattgacggtatcgctcacgaactgcgaacaccgttagtgcgcctgcgttatcgactggagatgagcgataacctgagcgccgccgaatcccaggcgttgaatcgtgatatcagtcaacttgaagctttaattgaagagctgctgacttatgcccgactcgatcgcccacaaaacgagcttcatcttagcgaaccagacctgccgttgtggctgagtacgcatctggcagatattcaggcagtaacgcccgataaaacggtacggataaaaacgctcgtgcaaggccattatgcggcgttggatatgcgcttaatggagcgcgtgctggataatttgctcaataacgccctgcggtactgccatagtacggttgaaaccagcctgctactgagcgggaatagagcgacattaattgttgaggatgatggcccagggattgccccagaaaaccgcgaacatatctttgaaccttttgttcgcctcgatcccagccgggatcgcagtaccggcggctgcgggctggggctggcaattgtccactctatagcactggcaatgggcggtacggttaattgtgacaccagcgaactgggtggtgcccgcttcagctttagctggccgttatggcataacatcccgcaatttacctctgcctgacactacgcgcacgatggtcaagtcaccacgactgtgctataaaataagtatgttgtaactaaagtggttaatattatggcgcgttacgatctcgtagaccgactcaacactacctttcgccagatggaacaagagctggccatatttgccgctcatcttgagcaacacaagctattggttgcccgcgtgttctctttgccggaggtaaaaaaagaggatgagcataatccgcttaatcgtattgaggtaaaacaacatctcggcaacgacgcgcagagcctggcgttgcgtcatttccgccatttatttattcaacaacagtccgaaaatcgcagcagcaaggccgctgtccgtctgcctggcgtgttgtgttaccaggtcgataaccttagccaagcagcgttggtcagtcatattcagcacatcaataaactcaagaccacgttcgagcatatcgtcacggttgaaagtgaactccccaccgcggcacgttttgaatgggtgcatcgtcatttgccggggctgatcacccttaatgcttaccgcacgctcaccgttctgcacgaccccgccactttacgctttggttgggctaataaacatatcattaagaatttacatcgtgatgaagtcctggcacagctggaaaaaagcctgaaaagtccacgcagtgtcgcaccgtggacgcgcgaggagtggcaaagaaaactggagcgagagtatcaggatatcgctgccctgccacagaacgcgaagttaaaaatcaaacgtccggtgaaggtgcagccgattgcccgcgtctggtacaaaggagatcaaaaacaagtccaacacgcctgccctacaccactgattgcactgattaatcgggataatggcgcgggcgtgccggacgttggtgagttgttaaattacgatgccgacaatgtgcagcaccgttataaacctcaggcgcagccgcttcgtttgatcattccacggctgcacctgtatgttgcagattaacgcccggctttcatactgccgaccatctgttctggccgtacccagctgtcaaactcggcttcgctaagataccccagcgcaagggccgcagcttttaaggtcagcccttctttatgcgcttttttggcgatctcggcggctttgtcataaccaatgtgggtgttaagcgcagtcaccagcatcaggctttcattgagtaattgattgattcgctcacgattcggttcaatacccactgcgcagtgtttgttaaaactttccatgccatctgccagcaagcgcacgctttgcaggaaattgtggatcaccattggacggaagacgttcagttcaaagttaccggaagcgccccccatgttgatcgccacgtcgttccccatcacctgacagcagagcatggttaatgcctcacactgtgttgggttcactttccccggcatgatactgctgcccggctcattttccgggatactgatttcaccaattccgcagcgcgggccagaggccagccagcggacatcattggcgattttcatcagactcgcagccaaccctttcaacgcgccgtgcgcctgaaccagggcatcacaggtcgccagcgcttcaaatttgttcggcgcggtaacaaacggtgcacaggtaatgactgccagttcatctgctacgcgacgcgcatactccggatgggtatttagtccagtacccaccgctgtaccgccaagagccagttccgctacgtgaggcaggctgtattcgatatgtttgagattatgctcgagcatcgctacccagccggaaatctcctgccccagcgttaacggcgtggcatcctgcaagtgagtacgaccaattttgacgatatcggcaaaagcacgggatttctcattcagtgtctgtgtcagggttttaagctgaggaatgagttgcttgcgcagcgccagcagcgccgcaacgtgcatcgccgtcggaaagacatcgttggaactttggcttttgttcacgtcgtcgttagggtgaactttacgttccatcccgcgcacaccgccgagtaattcactggcccggttagccagcacttcgttcatgttcatgttactttgcgtgccggagccggtctgccagatagccagcgggaattcgtcgtcatgctgtcctgccagtacttcatccgccgcctgacgaatggcgctcgctttctcttcagacaacaagcctaaatcttcattaacttttgccgctgcacgcttggttagcgccagcgcatgaatcagactggtgggcattttctccgtgctaatgcggaaatgctccaggctgcgttgagtttgtgcgccccacagcttatctgccgggacatcaatcgcccccatgctatctttttcgctgcgtactgtattcatgacctgctcctcacctgattaattttttctttctgttttgctttcgttaagcaacttttagctcacttattatttaccatttgataacaaatgtttggtctttcgtgccatgtaaaaaaaccgccccgaagggcggctctgtttatttcacacagcgggtgcattgtgtgagttgtatctgctggaagaagtcatttcctttatcatccacaaggataaacgccgggaaatcttccacttcaattttccagatggcttccattcccagttccggatattcaacacattccaggctcttaatacttccctgcgccaatacagcggccggaccaccgatactgccaaggtagaagccgccgtgttttttacaggcatccgtcacctgctggctgcggttgcctttcgccagcatgatcatacttccgccctgcgcttgcagttgatcgacataagaatccatccgtccggcggtcgttgggccaagagaaccggaggcataaccttccggcgttttggccggacccgcgtagtaaatcggatgatctttgatgtactgcggcagcccttcaccgttatccatccgctctttcagtttggcgtgagcaatatcacgaccgacgataatcgtgccgttaaggcttaagcgtgtagaaacgggatactggctcaactgtgcgaggatctctttcatcggacggttaaggtcaacgcgcaccgcttcgccttctcccgctttgcgcagctcttccgggatatatttgcctggattatgttccagtttttcgatccagatcccctgacggttgatcttcgctttgatattacggtcagcagagcaggagacgcccataccgaccgggcaggatgcgccgtgacgtggcaggcgaatcacgcggatgtcgtgagcgaagtatttaccaccaaactgcgcacccagaccaagattttgcgcttcgatcagcaattctttttccagttccacatcgcggaacgcctgaccgtgctcattcccttccgttggcagttcatcatagtatttcgcggaagccagtttcaccgttttaaggttcgtttctgcagaagttccaccaataacgaacgcaatatgatacggaggacaggccgccgtacccagcgtgcgcatcttctcaaccaggtaatttttcagtttccccggcgtcagtaacgctttggtttcctgatagagatacgtcttgtttgcgctaccaccacctttggcgatacagaggaatttgtattcgtcgccatcaacggcataaagatcgatctgcgctggcagattggtgccggtattcacttctttatacatatccagcggcgcgttttggctgtagcgcagattatcttcgatataagtgttatagacaccgcgcgccagcgccgcttcatcaccaccaccggtccatacacgctgcccttttttaccaacaataatcgcggtgccggtatcctgacaggttggcagaacgcctttcgccgcgatgtcggagttacgcaggaattgcagcgccacatatttatcattttcgctggcctccgggtcacgcagaatgtcggccacctgttgttggtgcgccggacgcagcatgaagctcgcatcatgaaacgcctggcgcgccaacagagttaacgcttcgggtgcgactttcaaaatctcctgcccttcaaattcagatacgctaacgtgttcgctggttagcaggtaatactcagtatcatcttttttgagtggaaaaggagcctgataatgaaagggtttgttactcattgttctctcacttactgcctggtttggttatgctctgggcgggtgttccgttgccctgttaaaagcgagtaacaatatcctacacacttttttaacaaaaactgagactagtacgactttttgcggctccaggttacttcccgtaggattcttgctttaatagtgggattaatttccacattaaaacagggattgatcatgcaaaaactcattaacagtgtgcaaaactatgcctggggcagcaaaacggcgttgactgaactttatggtatggaaaatccgtccagccagccgatggccgagctgtggatgggcgcacatccgaaaagcagtagtcgagtgcagaatgccgccggagatatcgttagtctgcgtgatgtgattgagagtgataaaagcactctgctcggagaggccgttgccaaacgctttggcgaactgcctttcctgttcaaagtattatgcgcagcacagccactctccattcaggttcatccaaacaaacacaattctgaaatcggttttgccaaagaaaatgccgcaggtatcccgatggatgccgccgagcgtaactataaagatcctaaccacaagccggagctggtttttgcgctgacgcctttccttgcgatgaacgcgtttcgtgaattttccgagattgtctccctactccagccggtcgcaggtgcacatccggcgattgctcactttttacaacagcctgatgccgaacgtttaagcgaactgttcgccagcctgttgaatatgcagggtgaagaaaaatcccgcgcgctggcgattttaaaaagcgccctcgatagccagcagggtgaaccgtggcaaacgattcgtttaatttctgaattttacccggaagacagcggtctgttctccccgctattgctgaatgtggtgaaattgaaccctggcgaagcgatgttcctgttcgctgaaacaccgcacgcttacctgcaaggcgtggcgctggaagtgatggcaaactccgataacgtgctgcgtgcgggtctgacgcctaaatacattgatattccggaactggttgccaatgtgaaattcgaagccaaaccggctaaccagttgttgacccagccggtgaaacaaggtgcagaactggacttcccgattccagtggatgattttgccttcagcctgcatgaccttagtgataaagaaaccaccattagccagcagagtgccgccattttgttctgcgtcgaaggcgatgcaacgttgtggaaaggttctcagcagttacagcttaaaccgggtgaaagtgcgtttattgccgccaacgaaagtccggtgactgtcaaaggccacggccgtttagcgcgtgtttacaacaagctgtaagagcttactgaaaaaattaacatctcttgctaagcttattaaaggcttataacaccttcaggcggccagtccgcctgatttcattttatggataatcattatgaataaaagcctggtagcggtaggcgtcattgttgcgctaggcgtagtctggacaggcggcgcatggtatacaggcaagaagattgaaacccatctcgaagacatggtcgcgcaggcgaacgcgcaactcaaactgacagctcctgaatccaacctggaagtgagttatcaaaactatcatcgcggcgtattcagcagccagttgcaactgttggtgaaacccattgccgggaaagaaaatccgtggattaaaagcggtcagagcgtcatcttcaacgaaagcgttgatcatggtcccttcccgcttgcccagcttaaaaaactgaacctgatcccgagcatggcaagtattcaaaccacgctggttaataacgaagtaagcaaaccactgtttgatatggcaaaaggtgaaacgccttttgagattaacagccgcattggttacagcggtgattccagttccgatattagcctcaagccactgaattacgagcaaaaggatgaaaaagtcgcctttagcggcggcgagttccagttaaatgctgacagagacggcaaagccatctccctttccggggaggcgcaaagtggtcggatagacgcagttaacgaatacaaccagaaagtgcagttgacctttaataatctgaaaaccgacggttccagcacgctggcaagttttggtgagcgtgtaggaaatcaaaaactgagtctggaaaaaatgaccattagtgtggaaggcaaagaactggcactgctggaaggcatggagatcagcggtaaaagcgatctggtcaatgacggtaaaacgatcaatagccaactggattacagcctaaacagcctgaaggtacagaatcaggatctgggcagcggcaagctgactttaaaagtcggccagattgatggtgaagcctggcatcagtttagccagcaatataacgcgcaaactcaggcgctgctggcacagccagaaattgccaacaaccccgaactttatcaggagaaagtgacggaagccttctttagcgccctgccgctgatgctgaaaggcgatccggtgattactatcgcgccgctaagctggaaaaacagtcagggtgaaagtgccctgaatctgagcctgttcctgaaagatccggcaacgactaaagaagcgccgcaaacgctggcgcaggaagtagatcgtagcgttaaatctctggatgcgaaactgaccattccggtggatatggcaactgagtttatgactcaggtagcgaagctggaaggttatcaggaagatcaagcgaaaaaactggcgaaacagcaagttgaaggtgcaagtgcaatggggcagatgttccgtctgaccaccttgcaggacaataccatcaccaccagcctgcaatatgctaacggtcagataacgttaaatgggcagaaaatgagcttagaagattttgttggcatgtttgcgatgccagctcttaacgttccggctgtaccggcaattccgcagcagtaattcacggccaaaacgccggagaattttcactccggcgttttcatctgaaaacaaaccagagattgcctgatgcgctacgcttatcaggcctaccttttcctgcaacactttgaatttatgagtttttgtaggctggataaggcgtttacgccgcatccggcataaaaaacgcgcactttgtcaacaatctgaaacgccggagatttttctctccggcgttattttttacttcagcataaagtcatactgaatactcattttcacatcccagtaattcaggcgatcgcccagcgtactgccatcgcgcttttcccgccctttatcggcagcaagaaagaaattcatcccttgtaacggcccttcgctgacccgatagttcataccacctaagatacccgtgccttcaatccgcacatctcgtttactggattcatagccgcgagtcacaatcggtgcaaatgtcagcgtaaattgcggcgttaaacgatagttgacgcccaattgccaggactgcattccttcacggttacgatcaagacttaaactaaagggatagccaatgtcggtatccaccacggcaccattcattgcatggcgcaaataaccaccactgccaaatacacttccccacggcgcattccaggtcaattgtccactaaccaacgccgtttcattgggctggctggtattacgacttaaaccttcgagctgcgcgtaaaagccgagcaactcccctttcaacgtataattcgggtcgagcggtatgcttttctcgagaatactttgtatctgattggaaacatctttctgtacgcttgcccccagagaatagcgactggtatcatcatgccaactggcggctaaaaaagaacgtgcgcgatgtttatcgtattttcccgtctggctgttatacaccccttcatcacgaataccggttgtactatcagtccataaaaatactcgactacgccacattccccacagatcaatatttggtgttaaagcccaataacctaatgctccttcagaaactgtcggtaatgtacgttggctactgccagccattaacggaatacgataaggtaagctaccataactataatccgtcccgaagcgacctaatttaagcaggctattttcactgggttttatttttactgcccccagggcaaagccaaaacttttatcaccatcaagataccaccgggtactcatatcagcacgagcacctaatttataaacataatacgccccgccttcaacgccaataatattggaataataaccactattgaaatcgagcaatcctccctgtacccatgcgtaaatatctcttcccgcgccagcactgggcttatccgccctgcgcaattcgtttttcagtctgatgcgtagtcccgcttcatcgtcagccagttgcgccgcataagcagaggtaaggccagaggcagccgtcaggcaaataacggccatggccactatttttctcatagttgcacctttgatgttctgattatttttattgaatattaattagtgatatcgctgattaattgctgctgcacttttttacgattatcaatttcaaccacgatttctttgaattttttatccgtgagcggataaaaccagataataacgaatgccagtagcataaatccgcaaggtactaaggcaatacttgtgcggatgcccataataacttccggcgtttgcacctgattggcgatatatccgcttaaccccaaaataaaggcaggaatactacctccgattgcctgaccgcatttacgggtaaaactgaatagactataggtgagcccttcaattcgcacgccggtcaggtattcaccgtattctacggtatcagcttccagcgcccacatcacggtcatggtaacgccctgaccaatactagcgatggccaacgcaaccaacgccaccggcagactccagacggaaacccagaagaacagcagataaccgcaggttcccagcaaagcgccaatcaggaaggtattctttttaccgatcctcgcgaccatccccggcaccagcggtgcgcttgccacagtaccaaccaggttttgcaccagtaccagcacagtgaacagcccggtatcatttaacacatagcgcacgtagaacaagctgctggcgctgaccgcaaaggtgctaatcagcacacacagcgcaccgatgcacaacataaacagcgggcgattccgtttcagggtttgcagactgatattcaaactcggctgcgcaacgatacgtaccacattctcacgcgtgcttttgaagcagatgaagtaaagcaccattccggcaatcgccagcacaattgtccagaaatggtatacgctcaccatctcttccgggctggagttcttaatgctcggtcctatcagaaatgccaggcagacaaaggtcaaactagcggcaatcccacgagccgcgcccagacgggcgcgggattgtggttgttgggtcatcgcggtagcaagactaccataaggaatattcaccaggctgtagcaaagcccgaggcccatgtaggtcaaatatgcatacaccactttgctaccatggctccagtcggtcagcacccagaataccagcacgctgaagatcattaacggcgcagtaccgaagagtaaaaacgggcggaattttccccagcgggtattcacactgtccaccactcgtccggcaaagacgtcggcgaaggcatcgaatacccgcaccagtaacagcatggtgcccgccgcagcggcaccgacgccagcgacgtcggtgtagtaactcaacaggaagagcgcccccattgcgaaggcgaagttattggcgacgtcaccgaggctgtagccgacgatggtgcgccaggagagttgttgattcattgtttgcctccctgctgcggtttttcaccgaagttcatgccagtccagcgtttttgcagcagaaaagccgcgctcttcggtttgcggtcgcgagtgaagatccctttcttgttaccgccaacgcgcaatatgccttggctggtcgcaaaatcggcgaaattccatacctgttcaccgacgacggcgctgacgcgatcaaagacgcggtgatacatatccagccatgcacactgatactcttcactccacatgtcggtgtacatactgtgcagcccggctaacgtatccacgccgtattcggtgatgataatcggctgatgcagtttctcctgccaggccagaagttctttttccagtaccttctctgccgtttccaaatcgccgctttggacataccatccgtaataacggttcaggcacagcacatcaaagagatcgctgatggtatcggtgtgagcgtcgcagaacattacattgacgcaggtgatcggacgcgtcgggtcgagtttacgcgttgcttccgccagtggcgcgaaatattcccgtgcaccttgcggacgggtatccggttcgttggcaatactccacatcaccacgcttgggtggtttttgtcacgcgctatcagctctttaatcgcctgtaagtgcgcttgctgagtttccccgttgactgcctcttcgctgtacagttctttcggcttgttgcccgcttcgaaaccaatgcctaaagagaggttaaagccgacagcagcagtttcatcaatcaccacgatgccatgttcatctgcccagtcgagcatctcttcagcgtaagggtaatggctggtacggtaggagttggccccaatccagtccattaatgcgtggtcgtgcaccatcagcacgttatcgaatcctttgccacgcaagtccgcatcttcatgacgaccaaagccagtaaagtagaacggtttgtggttaatcaggaactgttcgcccttcactgccacactccggatgccgacgcgaagcgggtagatatcacactctgtctggcttttggctgtgacgcacagttcatagagataaccttcacccggttgccagaggtgcggattcaccacttgcaaagtcccgctagtgccttgtccagttgcaaccacctgttgatccgcatcacgcagttcaacgctgacatcaccattggccaccacctgccagtcaacagacgcgtggttacagtcttgcgcgacatgcgtcaccacggtgatatcgtccacccaggtgttcggcgtggtgtagagcattacgctgcgatggatcccggcatagttaaagaaatcatggaagtaagactgctttttcttgccgttttcgtcggtaatcaccattcccggcgggatagtctgccagttcagttcgttgttcacacaaacggtgatacgtacacttttcccggcaataacatacggcgtgacatcggcttcaaatggcgtatagccgccctgatgctccatcacttcctgattattgacccacactttgccgtaatgagtgaccgcatcgaaacgcagcacgatacgctggcctgcccaacctttcggtataaagacttcgcgctgataccagacgttgcccgcataattacgaatatctgcatcggcgaactgatcgttaaaactgcctggcacagcaattgcccggctttcttgtaacgcgctttcccaccaacgctgatcaattccacagttttcgcgatccagactgaatgcccacaggccgtcgagttttttgatttcacgggttggggtttctacaggacgtaacataagggactcctcattaagataataatactggtcaacctttaatctgattagttaaccaattctgtgttgcacacagttatctgtgagaaacccatggaagagaaatggaaataaaaagaactgacaccgcgatcaaaaaaccaaaaactgcaatacccacagcgtgatatagatcgcattaatctttaaaacagcgttgacagaagccataaaataagcaaccgaacgttcgttcgagcgtattgggaacgataaactctcatgacatatggctacagtgaatattttggggggaattctccgaagccgggaaggataatttttgcacagagaaattacgatatgaaacgcgggcacagttatcaccagcccgccgaaaaagagagagaatcaggatgcggttaagataccgccaatcatcgcgcgtaatccctgagcaaagctcgcttcacgcgccaggtcttccgcttcgatatcggccagtacaccgtaggtcagatccagcagtaaacgactagtcattgccgtgttgatgtctgggcttatctcgcctttttgctgggcatcacgcatccgctgggcaacaaattccgtgatcgtcatatgcttatttttaagcatggcggcgacctgtgggttacgcatcccttccgccataatttcaaccaccagcgcccgttgtccaaaggcttcatgggtgagagagacaatggactcgaccatatagtcaacgaaatgaatcccttcaatcggttcccggaaacgggccagcgccctctcctggtcctgtaagataatcgcctgaatcaaggcttctttggagatgaaatggtgatagagcgtcccgggactaatggcgcaagatttacagatggctttcatgctggcactgtgaaatccattttcactaaaaatctctctggcagcattgaggatccgggtccgtgtcggttgtgcttcagtctgcatgttatccatcattaaaccattatagttagcgtgaataactagtttaccgcgttgtcaggtgagcgcctatcattgctgttgaatagtgcgaaggcacactctattcgtatacttttcactctgaaattggttaaccaatagccgtgatttggctgccagttatttagcagagacgttgatgagtttatcccggtaaacaacacgcacggttgtttaccggtccgttagtgtattaattgagctcctgtaccccaccaccggagacggtgagaatttgtccgcttacccagctcgcagcagggctgcaaaggaacagcgctgcgttagcaatatcttgcggttggcccagacgtctgatcggcgtgtgctgtaacattttttgttcaatttctggtgtaataacggatttcagggcatcggttaatattgcccccggcgcaatgccatttacccgaatatttttttcacccaggtcaaacgccatatttctgaccagatgactggccgcagctttagaacttgcataggaagtcatgtttatatttttattttctgccgccatagaagtgatggtcagaataacgccaccgccatttttttccatttctggcgcaacaagttgactcagatggaaaaaagaaaacacattcagttcataagcacggcgaaaatccgccattggcatatcaaacggtttaggtccaccgccaccggcgttgttaaccagaatatcaactttacccagcttactgatagcaaagtctgccagtgcagagagttcctgttcggaagtaatatcacaacggcaggcaaatgcctgaccacccagttgttgaatttcgtctacaacatggttagctgcgtcggcgttaatatcactgaccaccacagatgcgccagctgtcgcgaatgtaatggcgatttctttaccaatacctgcacccgcacctgtgatgatggcgcattttccgtcgagtctcaggttgtcagaattaaacacataaacctcctgtgaacttcagtaaaaataaaaggcaccgcctgtgtgccacattttttatcattaaccttgaggaaaggacactaccaggtatagcagataaagagaggattatttcgctgcaatgagccgggcgggaataataagattgcgactatgcgtctcttcatgggtgattttttgcatcatgcgatccgcaagtgtgataccaagttcccgcgctggcgtgctggcccaggtaacaggtatatcatcaagtgtggttggtgtcgcatcggtaaatgccgccaggctaacctgttgctcaaagtaacgatcgactccgctttccccgctttgccgccctgctttgagcaaaccaaaccatgcccccatcgcaatagtttcgttatagcaaaccacggcactgatggtcgggttatgacgtaaaagcgccgtgatagcttccgcggcttgcttctggctggaagtgcactccaacacccaatcgctatgaaacggcaggccaaattttagtagagttgcacaatagcccccaacccgttctgcacgggttaaactggaactttgccctcccagccaggcgatccgctgatgcccattgcgaatgagatgctccgtcaacaactgtgcagcctgcatgttgtccgggcgaaccgtatcaacatcatcaagataactggcacgggaagcgaaaatcaccgggatagctttttcttctgccatccgtcgcaggtcatcgctacttcctgcagctccggcaattaccacaccatcgacaccctgattcagtaacagactaaaccgctgtgccagctgctcaccgtctttaccgccgtgaagcaaaaaaaccatccgtccctgcgcttccagagcttccgtcaatccggccgtcaattcggcgtaaaacggcgcagataaatcacggacgatcaaaccaatgacgccgctttgcccgccgcgcagcgcgctcgcctggcgattgcgcacaaatcccagctcttcaatggcggcgttaacgcgttctcctgtggcggtagagattcgccctttgccactaagcaccaggctaacggtacttacgctcacgcccgcagccagcgcaacatcatgaatggttatttttttggcggtagccatgcagatgacctactccctgattatgtgacagataaaacgttttaccttttatttatcttatacccgctattatcgttgcgtaatgtgatttatgcctcactaaaatttgataaaacgttttatcttctcgcgcaatttactgaatccagattgttctctacgaggagtcgttttatgacggcgaaaacagcaccgaaagtcacgctgtgggagttcttccagcagttaggcaaaaccttcatgttacccgtggcattattgagcttctgcggcattatgctcggcattggtagttctcttagcagccatgatgtcataaccctgatcccggtcctgggcaaccccgtgttgcaggctatctttacctggatgagtaagattggcagctttgcttttagtttcctgcctgtcatgttctgtatcgccatcccgctgggcctggcacgcgaaaataaaggcgtagcggcattcgctggcttcatcggttatgcggtaatgaacctcgcggtaaacttctggttgaccaataaaggcattctgccaaccacggatgccgcggttctgaaagccaataacatccagagcattcttgggatccagagcatcgataccgggatcctcggtgcggtgatcgccggtattatcgtctggatgctgcatgagcgtttccataatatccgcctgccggatgcgctggcattcttcggcggtacgcgcttcgtaccaattatctccagcctggtgatgggccttgtcggcctggtgattccattagtctggccgattttcgccatgggtattagcggcttgggccatatgataaacagcgcgggtgatttcggaccgatgctgtttggtaccggtgaacgtctgctgttgccgtttggtctgcatcacattctggtggcattaattcgctttaccgacgcaggcggcacgcaggaagtctgcggtcaaaccgtcagcggcgcactgaccatcttccaggcgcaattgagttgcccgaccactcacggtttttctgaaagcgccacgcgtttccttagccaaggtaaaatgcctgcgtttctcggcggtctgccaggtgcagcgttagctatgtatcactgcgcgcgcccggaaaatcgccataaaattaaaggtctgctgatttctggcctgatcgcctgcgtcgttggcggcactaccgaaccgctggaattcctgttcctgttcgtagcgccagttctgtatgtcatccacgcgctgttaaccggcctcggcttcaccgtcatgtctgtgctcggcgtcaccatcggtaataccgacggcaatatcatcgacttcgtggtgttcggtattttgcatggtctgagtaccaagtggtacatggtgccagtggtggcggcaatctggtttgtcgtttactacgtcatcttccgtttcgctatcacccgcttcaatctgaaaaccccggggcgcgatagcgaagttgccagcagtatcgaaaaagccgttgccggtgcgccgggtaaaagtggttacaacgttcctgcaatcctcgaagcattaggcggtgccgacaatattgtcagcctcgataactgcattacccgtctgcgtttgtctgtgaaagatatgagccttgttaatgtgcaggcactgaaggacaatcgggcaattggcgtagtacaacttaatcaacataacctgcaggttgttatcgggccacaagttcagagtgtaaaagatgaaatggccggtctgatgcatactgtccaggcataaggataagatatgttcgattttagtaaggtcgtggatcgtcatggcacatggtgtacacagtgggattatgtcgctgaccgtttcggcactgctgacctgttaccgttcacgattagtgacatggattttgccactgccccctgcattatcgaggcgctgaatcagcgcctgatgcacggcgtatttggctacagccgctggaaaaacgatgagtttctcgcggctattgcccactggttttccacccagcattacaccgccatcgattctcagacggtggtgtatggcccttctgtcatctatatggttagtaaactgattcgtcagtggtctgaaacaggtgaaggcgtggtgatccacacacccgcctatgacgcattttacaaggccattgaaggtaaccagcgcacagtaatgcccgttgctttagagaagcaggctgatggttggttttgcgatatgggcaagttggaagccgtgttggcgaaaccagaatgtaaaattatgctcctgtgtagcccacagaatcctaccgggaaagtgtggacgtgcgatgagctggagatcatggctgacctgtgcgagcgtcatggtgtgcgggttatttccgatgaaatccatatggatatggtttggggcgagcagccgcatattccctggagtaatgtggctcgcggagactgggcgttgctaacgagcggcagcaaaagtttcaatattcccgccctgaccggtgcttacgggattatagaaaatagcagtagccgcgatgcctatttaagcgcactgaaaggccgtgatgggctttcttcccctagcgtactggcgttaactgcccatatcgccgcctatcagcaaggcgcgccgtggctggatgccttacgcatctatctgaaagataacctgacgtatatcgcagataaaatgaacgccgcgtttcctgaactcaactggcagatcccacaatccacttatctggcatggcttgatttacgtccgttgaatattgacgacaacgcgttgcaaaaagcacttatcgaacaagaaaaagtcgcgatcatgccggggtatacctacggtgaagaaggtcgtggttttgtccgtctcaatgccggctgcccacgtagcaaactggaaaaaggtgtggctggattaattaacgccatccgcgctgttcgttaaccccaattgcgcaacgtaaaaaatcgttgcgcaatcgtggatttttaccctgctttgtttttataatggtgcgcacttttatatccagaaaaagagtgcgaccatgattgataccaccctgccattaactgatatccatcgccaccttgatggcaacattcgtccccagaccattcttgaacttggccgccagtataatatcagccttcctgcacaatccctggaaacactgattccccacgttcaggtcattgccaacgaacccgatctggtgagctttctgaccaaacttgactggggcgttaaagttctcgcctctcttgatgcctgtcgccgcgtggcatttgaaaacattgaagatgcagcccgtcacggcctgcactatgtcgagctgcgttttagtccaggctacatggcaatggcacatcagctgcctgtagcgggtgttgtcgaagcggtgatcgatggcgtacgtgaaggttgccgcacctttggtgtgcaggcgaagcttatcggcattatgagccggaccttcggcgaagccgcctgtcagcaagagctggaggcctttttagcccaccgtgaccagattaccgcacttgatttagccggtgatgaacttggtttcccgggaagtctgttcctttctcacttcaaccgcgcgcgtgatgcgggctggcatattaccgtccatgcaggcgaagctgccgggccggaaagcatctggcaggcgattcgtgaactgggtgcggagcgtattggacatggcgtaaaagccattgaagatcgggcgctgatggattttctcgccgagcaacaaattggtattgaatcctgtctgacctccaatattcagaccagcaccgtagcagagctggctgcacatccgctgaaaacgttccttgagcatggcattcgtgccagcattaacactgacgatcccggcgtacagggagtggatatcattcacgaatataccgttgccgcgccagctgctgggttatcccgcgagcaaatccgccaggcacagattaatggtctggaaatggctttcctcagcgctgaggaaaaacgcgcactgcgagaaaaagtcgccgcgaagtaacaaaatggatggtgcaaatgcaccatccatttttcatgcaaggcacaaagtcgcgcgatgtttggcggattcgatgcccagctcaatcaactccattacctggattgcctggcttgccggaaccggattttcaccatcgccatttaacgcatcacgaatagccgcatagtaagccggataattcccaggcaccgtcaacagcgtttcttcgacacgttcctcaccttccacgcgggtaagtacgccatcacgcatatcgtagccccagtcttcctgcggtagacgctcgccatttttcagacgttcttcctgtggatcgaggccatatttcacataactgcctcgggatccatgcacgatataccgtgcactctcagcggctgccagcatggtaccgtgtaaaatgactcgccgctgtggataggacaagatggcgtggaaataatcggtgctctgcgctccgggccgtaactgtgccaaatctaccgtcatgctgaccggtaaaccaaaaagcgtaatggcctgatcaagaagatgtggtgctaaatcgtaccagataccgctgcctgggccgccctgttcacgccaacgatcgcgcacctgcggacggaagcggtcaaaatgagactcaaagtaagcaacttcacccagcacgccttccgcgagtaaaccttttagcgtcaagaaatcgctatcccagcgacggttatggaatacagacagcacacgccccaggctttttgccagcgcatccagctctcgcgcttgactcagtgtcacggtaaagggtttatcaacgaccacatgtttacccgcctcaagcgccgctttggctaacgggaaatgggtatcgttgggtgtaggaatgacaatcaggtctatgttgggatcgttaaacagatgcttcggctcagagacaaccgtaaccgttggccagtcggcttttacttttgtttcatcactgctggagattaccgccagttcctgcccgggcgtgcccgcaatcaggggcgcatggaaggttttgctcgcataaccatacccaatcaacccaacacggatgttgtcgctcatgtcattgcctctcattgaagtatgatggctatttgacactatcctttacccacgctcaacagtttaataacctgccagcaataagggatgttgtttaacttaagtcaaaaaaatagcgaattttccaacgacaaaagctaaatatcgcaaaaacctcagtaaaaatcttgctggagctattattgctaagtaacatttaccccctgaagttaatggatcaatcaagagagatgtgggctgtaatgaatcgtcttattgaattaacaggttggatcgttcttgtcgttagtgtcattcttcttggcgtggcgagtcacattgacaactatcagccacctgaacagagtgctagcgtacaacacaagtaagctctgcacttgtggagcgacatgctgcccgtccgggtgcatgttttcacttgtcggatattaaaccaggaatttattatcttgttcgatgttgttggtgattgtcagggatagtaaagcgcgttactcttttcagagcagtttttcatccctgaatatttgccatcagcgcattcttattattgtaataacacaagcgttcacttttggtgaaattttatcatcactaataatacctacccctttggtattaattattttatggaccttttatgactgttcaggactacttattaaaatttcgcaaaatcagtagtctcgaaagtctggaaaaactctacgaccatcttaattacaccctgacggacgatcaggaactgatcaatatgtatcgtgctgccgatcaccgtcgcgcagagctggtttctggcgggcgtttgtttgacctcggccaggtaccgaagtccgtctggcactatgtccaataaagaaagtagcgatcggttataaaagccttataataacgcccctaaaattagatttgcctgtttgcgtcgctattctggagaacctatgaccaccacaacgccacaacgtattggaggctggttgcttggcccgttggcctggcttttagtcgctctgttgagtacgacgctggcgttgttgctgtataccgctgcgttatcttctccgcaaacatttcaaacgctcggcggacaagcactgacgacacaaatcttatggggcgtttcttttattaccgctatcgccttgtggtattacacactgtggttgaccatcgctttctttaaacgtcggcgttgtgttcctaaacactatattatctggctgcttatttccgtattgctggcagtaaaagcattcgcttttagtcccgtggaagatggcatagccgttcgccagttgctgtttactttgttggcaaccgcattgatcgtcccctatttcaaacgcagcagccgggtaaaagcgacgtttgtgaatccgtaataaccttacagttaacctgttgtcgcctgctctggattaacggataataggcggcttttttatttcaggccgaaaaatgactgactacctgttactgtttgtcggaactgtactggtcaataactttgtactggtcaagtttctcggtctctgtccgtttatgggggtttccaaaaaactggaaaccgcgatgggcatggggctggcaacaacgtttgtgatgacgctggcgtctatttgcgcctggcttatcgatacgtggattttgatcccacttaatctgatttacctgcgcaccctggcatttattctggtgattgctgtggtcgtgcagttcaccgagatggtggtgcgcaaaaccagcccggtgctttaccgtctgctggggatttttttgccgcttatcaccaccaactgtgcagtgctcggcgtggcgttgctgaatatcaatctcgggcacaatttcttgcagagcgcgctgtacggtttttccgccgctgtcggtttcagcctggtgatggtgctcttcgccgccatccgcgaacgccttgctgtggctgatgtcccggcaccttttcgcggtaatgccattgcgttaattaccgcaggtcttatgtctctggcctttatgggctttagtggtttggtgaagttgtaatgaatgctatctggattgccgttgccgccgtgagcctgctgggcctggcgtttggcgccattctgggttatgcctcccgccgttttgcggtggaagacgatccggtcgttgagaaaattgacgaaatcttaccgcagagccagtgtggtcagtgcggttatcccggctgtcgcccctacgcggaagccatcagctgtaacggtgaaaaaatcaaccgttgcgccccaggtggcgaagctgtgatgctaaaaattgccgagttgcttaatgtcgagccgcagccgctggatggcgaagcgcaagagataacgcctgcgcggatggtggcggttattgatgaaaataactgtattggctgcactaaatgtattcaggcgtgtccggtagacgccatcgttggcgctacccgtgccatgcatacggtaatgagtgatctctgtacgggctgcaatttatgtgttgatccgtgcccgacgcactgcatcagcttgcaaccggtcgcagaaacacctgactcctggaaatgggatctgaacaccattcccgtgcgtatcattcccgtggaacaccatgcttaagttattctctgcattcagaaaaaataaaatctgggatttcaacggcggcatccatccaccggagatgaaaacccagtccaacggtacacccctgcgccaggtacccctggcgcagcgttttgttattccactgaaacagcatattggcgctgaaggtgagttgtgcgttagcgtcggcgataaagtattgcgcggccagccgcttacccgtggtcgcggcaaaatgctgcctgttcacgcgcccaccagcggtaccgttacggctattgcgccccactctacggctcatcctagtgctttagctgaattaagcgtgattattgatgccgatggtgaagactgctggatcccgcgcgacggctgggccgattatcgcactcgcagtcgcgaagagttaatcgagcgcatacatcagtttggtgttgccgggctgggcggtgcaggattcccgacaggcgttaaattgcagggtggcggagataagattgaaacgttgattatcaacgcggctgagtgcgagccgtacattaccgccgatgaccgtttgatgcaggattgcgcggctcaggtcgtagagggtattcgcattcttgcgcatattctgcagccacgcgaaattcttatcggcattgaagataacaaaccgcaggcgatttccatgctgcgcgcggtgctggcggactctaacgatatttctctgcgggtgattccaaccaaatatccttctggcggtgctaaacaattaacctacattctgaccgggaagcaggttccacatggcgggcgtagttccgatatcggcgtattaatgcaaaacgtcggcactgcttatgcagtgaaacgtgccgttattgatggcgagccgattaccgagcgtgttgtaaccctgactggcgaagcaatcgctcgcccgggcaacgtctgggcacggctggggacgccagtgcgtcatttattgaatgatgccggattctgcccctctgccgatcaaatggtgattatgggtggcccgctaatgggctttaccttgccatggctggatgtcccggtcgtaaagattaccaactgtctgttggctccctctgccaatgaacttggcgaaccacaggaagaacaaagctgcatccggtgtagcgcctgtgctgacgcctgccctgcggatcttttgccgcaacagttgtactggttcagcaaaggtcagcaacacgataaagctaccacgcataacattgctgattgcattgaatgtggggcttgcgcgtgggtttgcccgagcaatattcccctggtgcaatatttccgtcaggaaaaagctgaaattgcggctattcgtcaggaagaaaagcgcgccgcagaagccaaagcgcgtttcgaagcgcgccaggctcgtctggagcgcgaaaaagcggctcgccttgaacgacataagagcgcagccgttcaacctgcagccaaagataaagatgcgattgctgccgctctggcgcgggtgaaagagaaacaggcccaggctacacagcctattgtgattaaagcgggcgaacgcccggataacagtgcaattattgcagcacgggaagcccgtaaagcgcaagccagagcgaaacaggcagaactgcagcaaactaacgacgcagcaaccgttgctgatccacgtaaaactgccgttgaagcagctatcgcccgcgccaaagcgcgcaagctggaacagcaacaggctaatgcggaaccagaacaacaggtcgatccgcgcaaagccgccgtcgaagccgctattgcccgtgccaaagcgcgcaagctggaacagcaacaggctaatgcggaaccagaagaacaggtcgatccgcgcaaagccgccgtcgaagccgctattgcccgtgccaaagcacgcaagctggaacagcaacaggctaatgccgagccagaacaacaggtcgatccgcgcaaagccgccgtcgaagccgctattgcccgagccaaagcgcgcaaacgggaacagcaaccggctaatgcggagccagaagaacaggttgatccgcgcaaagctgccgtcgaagcggctattgcacgcgccaaagcacgcaagctggaacagcaacaggctaatgcggtaccagaagaacaggttgatccgcgcaaagcggcagttgccgcggctattgcccgcgctcaggccaaaaaagccgcccagcagaaggttgtaaacgaggactaaatggtattcagaatagctagctccccttatacccataaccagcgccagacaagccgcattatgctgttggtgttgctcgcagccgtgccaggaatcgcagcgcaactgtggttttttggttggggtactctcgttcagatcctgttggcaagcgttagtgctctgttagccgaagctctcgtactcaaactacgcaagcagagcgtagccgcagcgttgaaagataacagtgcattgctgacaggcttattgctggcggtaagtattccccccctcgcgccatggtggatggtcgtgctgggtacggtgtttgcggtgatcatcgctaaacagttgtatggcggtctgggacaaaacccgtttaatccggcaatgattggttatgtggtcttactgatctccttccccgtgcagatgaccagctggttaccgccacatgaaattgcggtcaacatccctggttttatcgacgccatccaggttatttttagcggtcataccgccagtggtggtgatatgaacacactacgcttaggtattgatggcattagtcaggcgacaccgctggatacatttaaaacctctgtccgtgccggtcatagcgttgaacagattatgcaatatccgatctacagcggtattctggcgggcgctggttggcaatgggtaaatctcgcctggctggctggcggcgtatggttgctatggcagaaagcgattcgctggcatattcccctcagcttcttagtaacgctggcgttatgcgcaatgttgggctggttgttcagtccagaaacactggcagcaccgcaaattcatctgctgtctggagcgaccatgctcggcgcattctttattttgactgacccggttaccgcttctacgaccaatcgtggtcgtcttattttcggcgcgcttgcgggcttattagtctggttgatccgcagtttcggcggctatcctgacggcgtggcttttgccgtcctgctggcgaacatcacggttcctctgatcgattactacacgcgtccgcgcgtctacggccatcgcaaagggtaaaccatgctgaaaactatccgaaaacacggcattacgttggcgctatttgcagcgggtagtacagggttaactgcggccatcaaccagatgaccaaaacgacgattgctgaacaggccagtctgcaacaaaaggcgttatttgatcaggtgctgccagccgaacgctataacaatgcgctggcacagagttgctatctggtaactgcgccagagttaggtaaaggtgagcatcgggtttacatcgccaaacaggatgacaaaccggcagccgccgttctggaagcaaccgcgccagatggctattccggtgcgattcagctgctggtgggagccgattttaacggcacggtacttggcacgcgcgtgacagagcaccacgaaacgccagggcttggcgataaaatcgaactgcgcctttctgactggatcacccattttgcgggtaaaaaaatcagtggtgcagatgatgcgcactgggcggtgaagaaagatggtggtgatttcgaccagttcaccggcgcgacgattactccccgcgcggtggttaatgcggtaaaacgcgccggattgtacgctcagacgttaccggcacaactttctcaacttcctgcctgtggagaataaagcgtgagcgaaattaaagacgttattgttcaggggttgtggaaaaacaactctgcgctggtccagttgctcggcctttgtcctctgttggcggtcacgtccactgccactaacgctctgggtttaggacttgcgactacgctggtactgacgctgaccaacctgaccattagcacgctgcgtcactggacgccagccgagatccgcattcccatttacgtgatgatcatcgccagcgtggtcagcgctgtacagatgctgatcaacgcctacgcctttggcctgtatcaaagtttagggatttttattccgctgattgtcactaactgtatcgttgtgggccgcgctgaagccttcgccgccaaaaaaggtccggcgcttagcgcactggacggctttagtattggtatgggcgcaacctgcgccatgttcgtgctgggtagtctacgcgaaattatcggcaatggcacattgtttgacggtgcagatgcgctgttaggtagctgggcaaaagtattacgcgtggagattttccacaccgactcccctttcctgctggcgatgctgccaccaggtgcatttattggcctgggactgatgctggcaggaaaatacctgattgatgaaagaatgaaaaagcgccgtgctgaagcagctgcagaacgtgcattgccaaacggtgaaacagggaatgtctgatgaataaagcaaaacgcctggagatcctcactcgcctgcgtgagaacaatcctcatcccaccaccgagcttaatttcagtagcccttttgaattgctgattgccgtactgctttccgctcaggcgaccgatgtcagtgttaataaggcgacggcgaaactctacccggtggcgaatacgcctgcagcgatgcttgaactgggcgttgaaggggtgaaaacctatatcaaaacgattgggctttataacagcaaagcagaaaatatcatcaaaacctgccgtatcttgctggagcagcataatggcgaggttccggaagatcgtgctgcgcttgaagccctgcccggcgtaggtcgtaaaacagccaacgtcgtattaaacactgcattcggctggccgactattgctgtcgacacgcacattttccgcgtttgtaatcgtactcaatttgcgccggggaaaaacgtcgaacaggtagaagaaaagctactgaaagtggttccagcagagtttaaagtcgactgccaccattggttgatcctgcacgggcgttatacctgcattgcccgcaagccccgctgtggctcttgtattattgaagatctttgtgaatacaaagagaaagttgacatctgaagaaaaggggtaacaccgattaccccattgataacctttctttatcctcttttaaaacatctttttaacgtcaatgatgccattgcttagcgttatcatcaggtaatccgtttgcggataaccaaaaatgcaggttaattgtttttttaatagcgaaattttctattcattcgtgatcaagatcacgatgctgtcgcaatgtaaaaacattgcaagaatcaggttaaatcatttaaatttacacacgcaacaaatattgacctacaaaacattacactggctatttttcagaaactggactatctcactagtaaaaacgctaaatagcagaacatatcgccgttaagccatcacccccctctcagtgcagtgaaaaaatctgccgttacgttttttgaaaaatttaacgctggataacatttcccggaatggttgaattccccgcctcagttatatgtaacagattattacaaaggacttgtctgaaagtgcaagatagtgaacattacctgccgtttcccctcccactataacaattgcgcgtatgttttttatacataacgcgagaaagcacccccgttaatatgggatgtaaaaaaagaggtaaaagtgtccactgcaaaccaaaaaccaactgaaagcgtcagtttgaacgctttcaaacaaccgaaggcgttctatctcatcttcagcattgagttatgggaacgttttggttattacggcctacaaggaattatggctgtttacctggttaaacaactgggtatgtctgaagcggatagtatcacccttttctcttcctttagtgccctggtttatggtctggtcgctatcggcggctggttaggtgacaaggtactgggtactaaacgcgtaattatgctcggcgctattgtgctggcgattggttatgctctggttgcctggtctggtcacgacgccggtatcgtttatatgggtatggcggctattgcggtcggtaacggcctgtttaaagctaacccgtcttctctgctttctacatgctatgagaaaaacgacccgcgtctggacggtgcattcaccatgtactacatgtccgtcaacatcggctctttcttctctatgattgctacgccgtggctggccgcgaaatacggctggagtgttgcgtttgcgttgagcgttgtaggcctgctgatcactatcgttaacttcgccttctgccaacgctgggttaaacagtacggtagtaaaccagacttcgagcctatcaactaccgtaacctgctgctgaccattattggtgttgtggcactgatcgctatcgccacctggctgctgcacaatcaggaagttgcgcgtatggcgctgggcgttgttgccttcggtatcgtggttatcttcggtaaagaagccttcgcgatgaaaggtgctgcgcgtcgtaaaatgatcgttgccttcatcctgatgctcgaagccattatcttcttcgtgctgtacagccagatgccaacgagtctgaacttctttgcgattcgtaacgttgagcactccattctgggtctggccgtagaacctgagcagtatcaggcactgaacccgttctggatcatcatcggtagtccgattctggccgctatctataacaagatgggcgataccctgccgatgccaaccaagtttgcaatcggcatggtgatgtgttctggtgcgttcctgattctgccgctgggtgcgaaattcgcgtctgacgctggtatcgtgtctgtaagctggctggtcgcaagctatggcctgcagagcatcggggaactgatgatctctggtctgggtctggcaatggttgctcaactcgttccgcagcgtctgatgggcttcattatgggtagctggttcctgaccactgccggtgcaaacctgattggtggttatgttgcgggtatgatggctgtgccggataacgttaccgatccgctgatgagtctggaagtctatggtcgcgtattcttgcagattggtgtcgctactgccgttattgcagtactgatgctgctgaccgcgccgaaactgcaccgcatgacgcaggatgacgctgcagacaaagcggcgaaagcagccgtagcgtaaaattcagggaaactcttttacaagccgctaacttttcgttagcggctttttttttgttcagcaacgcactaccatactttaaaccacagacaaaaggagttaccgatgaaattgttctacaaaccgggtgcctgctctctcgcttcccatatcaccctgcgtgagagcggaaaggattttaccctcgtcagtgtggatttaatgaaaaaacgtctcgaaaacggtgacgattactttgccgttaaccctaaggggcaggtgcctgcattgctgctggatgacggtactttgctgacggaaggcgtagcgattatgcagtatcttgccgacagcgtccccgaccgccagttgctggcaccggtaaacagtatttcccgctataaaaccatcgaatggctgaattacatcgccaccgagctgcataaaggtttcacacctctgtttcgccctgatacaccggaagagtacaaaccgacagttcgcgcgcagctggagaagaagctgcaatatgtgaacgaggcactgaaggatgagcactggatctgcgggcaaagatttacaattgctgatgcctatctgtttacggttctgcgctgggcatacgcggtgaaactgaatctggaagggttagagcacattgcagcatttatgcaacgtatggctgaacgtccggaagtacaagacgcgctgagtgcggaaggcttaaagtaatagccatcggcccacaggtcgttgtgggccgaaatgagatatttcagagctttgttgcgctgaagtaatgttctggtttggcaatacgatcctgagcagccaccacttgcagctcatattcctgcattgctttggtggtcaccatgatttcgtagactgcagcggtcacatgttccagcgcctcctgcagcgttgccccctgaagcagtttcaccagcagtaaaccgctcgtcacatcaccaacacctaccggctggcgcataccaaaatccaccagcggacggctgatatgccaggcttcatcggcggtgaccagcagcatttcaaaacggtcacggctgtagccagctcgcgccaggtgtttaaccaacacaatttgtggcccttgcgcaatgagttcgcgcgctgccagaaccgcttcttcgacgttatttaccgcatgctcacagagtatttccagctcaaccagatttggcgcaatgatatcgctggcaggcaaaccgtgccgcacatgaaactctgcgacacccggtgcaacgatacagcctttttccggatgacccattaccggatcgcaaaaatatttcgcctgcggattcgcggctttcacctgacggacgataccgaggatatgttcaccctgctccgcgcttcccagatagccacttaatacggcatcacaggtgtgtaatttatcaatggcggcaatgccttgcacaatttcggttaaatggctgggcggcatcacgcagccagtccatttgccgtattgggtgtgattagaaaattgaacggtgttcagcggccagacgttcgcgcccaggcggcgcatcggaaactctgccgcactgttacccgcatgaccataaacaacgtgagactggatagcgagaatatttttcatcatgttccctgtataaaaaccagggggagtgatttctcactccccctttccacttaatgcattatttccagcaaatcagacagtaattctttttaccgcgacgcagtaaggtaaaacgaccaaacagacgatcttcttctttaaagaagtattcaggatcggactgtttttcaccgttaatggtgatggcattggaggcgatagttttacgtgcctgaccacgggaaggttgcagttcagaatcgaccagtgcctgcatcaggtctgcgcccttttccatctcaaccatcggtacgccgtcctgcgccagctgttcgaagtccgcttcactcagcgcactcaaagaaccgctgaacaggcattcggtaatacgttttgccgcctgtaaaccttcttcaccgtgaaccagacgagtcacctgctccgccagtacatactgggcgcgcggtgctttaccgctgtttttatcttcttcttccagggcgttgatctcttcaatgctcataaaggtgaagaacttcaggaagcggtaaacgtcggcatccgcagtgttgatccagaactggtagaatttgtacgggctggttttcttcggatccaaccagactgcgccgccttcagttttaccaaatttggtgccatctgctttagtgatcagcggaacggtcaggccaaacacctgattctgatgcagacgacgggtcaggtcgataccagaagtgatgttaccccactggtcagaaccaccaatttgcagcaccacaccgtactgtttgttcagacaggcgaagtcataaccctgcaacaggttgtaggaaaactcagtgaagctaatcccctgatcttcacggttgagacgctgcttaaccgcttctttgttgatcatctggttaacggagaagtgtttgccaatatcgcgcaggaaggtcagcacattcatattgccgaaccagtcatagttgttcgccgcgatagcagagttttctccacagtcgaaatcgaggaacggggcaacctgcttacggattttgtccacccactcctgaacagtttcttcggtgttcagcttacgctcggcagctttgaagctcgggtcgccaatcagacccgtcgcgccgcctaccagcgcaaccggcttgtggcccgcctgctggaagcgtttcaggcataacaatggaacaagatgccccaaatgcaagctgtcagcggtaggatcgaagccgcaatagagcgcgatcgggccttgcgccagtcgctctgctaacgcttcctcgtccgtcacctgggctaccagcccccgctcttgcaattgtttaatcaagttactgcttgccatcaaaatctccatgtatataacgactgcacctttgccggtacacgacttttcgccagatgcgaaagagacatagaataaagtgccagaatcaggagtaccagcgattaaagcaagatttttgcatcttttcagggtgcaagacgatcaatcttccacgcatcattttcacgctggtacaaaaagcggtcatgcaggcgatgctcaccaccctgccagaactcaatctgttcaaggctgacgcgaaaaccgccccaaaagctcggcaatggcacttcgccctgttgaaacttctgcttcagctccaggaatttactttcaaggataccgcgggcagaaatgcgactggactgcttgctaacccatgcaccaatctggctatcacgcgggcggctatgaaaatatttcatcacttcgagagtgctaagtcgttctgctttaccgatcaccatcacctggcgctcaagggtatgccacgggaacagcaggctaacgcgcggattattttcgatttgatgtgctttacggctgccgaggttggtgtaaaacaccatgcctttttcgtcgtaatgtttgagtaaaacgatgcgctgataaggctgaccatgttcatccacggtagcgaccaccatcgcggtagggtccgccagtttggcttcacaagcctgagagagccaacgttcaaaaagggttaatggatcggcgggaagatcgcggcggcgtaacccgcctttggtgtattcacggcgcagatgcgcgatttgctgcaattcgtcgttatcagacatggttttctttacggattgtcagtgggtgacgctattgtgcgccgcccctggaaaaatctcaacgctgtggattttgtaactgacagttattcaagacgatgcggtcgcgtttatagacagtcgcttcatcgcctttgctccagaaaacatagattccgtcagtgtaacgcgcgccagaggcactaatgccctgtttgagatgcagtagttgattatcgtaaacaaaactgacctcctggcgcggattattcagtttgaccgtcaacggtttttcatcacactggtattccagcgtatcggtttgcatgcgctcaaccagctgattaaaggcgctacagccggagagaaggaccggcaaaatgataattaacagttttttcatagtcatatcccgaagactttcctggtctggagggcaatacgccctccctaacgttccaagtgtaacggcagacgcggtaagaaaaattcagttaactctgatatcacgggttagcggggaaaatagcccccagtaccgtctcctggcttgcgccagtgacggaaggcagatttcctggtaatcccgccagcgtccgccaggcaagccaggcgaaagccaatgcttccatgtcatcgccactaatgccaacggcatcggtggtggtgacttctgtgcctggcagtaatgccgccagacgcgccatgagtagcggattacgactacctccaccacataccatcaatcgttcgcagccaccgctcaacaaaacttgttcagaaatggtcacggcggtgagttctgccagtgtcgcctgcacatctcggggatcaacacccggaaaatggcgcaaatggcgctccagccaaccatagttaaagtattcgcgtccggtgcttttcggtgcaggttggctgaaatacgggtcgctgagcatattttgcagcagtgggagaataactttacccgcccgtgcccactcggcatctttatcgtaaggtttaccggcctgacgccagatccaggcatccatcagcatgttaccaggaccggtatcgtagcccccaaccggctgcccaggaatgagcagactcagattggcgatgccgccaatattgagcaccattcgtcgctcggttgggtgagccagcagcgcatgatggaacgcaggtaccagcggtgcgccttgtcctcccaaggcaatatcgcgacggcgaaaatcaccgacaaccgtaattccggtgcgtgccacaatttgattgttatcgccaatctgtaaagtgtgtggtgccacgcccgtcggttcatgccagacggtttgaccgtgacaaccgatcgcaactatatctcttgcctgcagattttgttccttaagcaaggcattgaccgcatcagcaaaaagttgcccgagttgagtatcaagctgtccaaactggctaagtgtaagctgctggccctggcaaatatccagtacagcctgtttcagagataccgggatcggccaactcaaacttgccagctgtgcgacccggtgttcatcaattgtcgccaacacaacatcaacaccatcaaggctggtgccactcataacgccaataaagcggccgcttttcatagttcatcctttttcaatctgacgtttgcgcaccactcaaacataaacttttcgtgaataccatgcggaatgaccgatttttaccgttggtagtaaaacattatcttcaaatcaataatcatcatgaatgttttgtttataattggttgatcctactttcattatgatttgctcatatttggtagaacatgtaaccatggattcacatatgccatatactttgaccatgagggatgcttgcgtggcgtttcatggtgaacaggagatttttcaatgattaaacgcgtattggttgttagtatggtaggtctgtctcttgtcggttgtgttaataacgacaccctgagtggggatgtttataccgcttctgaagcgaaacaagtacagaatgtcagctatggcaccatcgttaacgtacgtccggtacagattcagggcggtgatgattccaacgttatcggtgcaattggcggtgctgttcttggtggtttcctggggaatactgttggtggcggaaccgggcgttctctggctactgcagcaggcgctgttgcaggtggcgtagctggtcagggcgtacagagtgcaatgaacaaaacgcagggtgtcgagctggaaattcgtaaagacgatggtaataccatcatggtggtacagaaacaaggcaacactcgtttctctccgggccaacgtgtcgtactggccagcaatggcagtcaggtgaccgtttctccgcgctaaataagtttgcgtgtggtcaggttactgaccacacgcccccttcatttcaccctttggcctgtaactcaatgatattatgctcaagttttgcgatgagcgtaatcagttgctccagttcctctgcggagatgccatgtaatatttccgcgcgggttttgttaataacagcttccatttcgctgatcagcggctctgccttttccgtcagtttaatacgtttagcccgacgatcgctggcacaagtttgacggctaattaaccctttttcttccagttggtccagagtacggaccagacttggctgctcgatgccaatcgcttttgccagttgaatttggctctggtctggaggtaactgatggatattgtgtaacgtaacccaatgggtttgtgttaactccagcggtttcaggcgatggtctatcagagcacgccatatgcgcaccaaccgtgccagatcagaacctagtgggctttccaatttcatctccttataattagcttgctaagatattatgcggcttttagaatagtgtgcagcaattgtattgctaaaacaaatgtattgctgcatttggttaccgtcagacatatttttcagaaattgcgcgtaaatttttcgcacttaaagaatatttattaatctaacgcaatatattcggtcgtaaaggaatctactttgtgaagtttatgctcaatgcaacaggattgcccttacaagatctggtgttcggtgcgtccgtctactttcctccgtttttcaaagcattcgcgtttggattcgtcatctggcttgtcgtacaccgcctgcttcgtggctggatctacgccggtgacatctggcatcccttgttaatggatttaagcctgtttgcgatttgcgtttgccttgctctggcaatactgattgcgtggtaactatgagtattaaaacaattaagtatttcagtacaatcattgtagcggtagttgcggttcttgccggatggtggctgtggaattattacatgcaatctccgtggacacgcgacgggaaaatacgcgcagaacaggtttctatcaccccacaggtgagcggacgtattgttgagctgaatataaaagacaaccagctggttaacgcgggggatcttctgctcacgatcgataaaacgccctttcagatcgccgagctgaacgcacaggctcagctggcgaaagcgcaatctgacctcgcaaaagccaataacgaagcgaatcgtcgtcgtcatctcagtcaaaattttatttctgccgaagaactcgataccgctaacctcaatgttaaagcgatgcaggccagtgttgatgccgcacaggcgacgctgaaacaggcacaatggcaactggcgcaaacggaaattcgcgccccggtgagtggatgggtgactaaccttactacccgcatcggcgattacgctgataccgggaaaccgctgtttgcccttgtcgacagccacagcttttacgtcattggttattttgaagaaaccaagttgcgccatatccgcgaaggtgcaccagcacaaattaccctctatagtgataacaaaacgttacagggtcacgtttccagtatcggtcgggcgatttatgatcagagcgttgaaagtgacagtagccttattccggatgttaaacctaacgtcccctgggttcgactcgcccaacgcgttcccgtccgctttgcgctggataaagtcccaggcgatgtcacgttggtgagcggcaccacctgtagcattgccgtaggtcaataatgaacgcaagcagttggtccttgcgcaatttgccctggttcagggccacgctggcgcaatggcgttatgcgttacgcaataccattgccatgtgtctggcgctgacggttgcctattatttaaatctggatgaaccctattgggcgatgaccagcgctgcagtggttagctttcccaccgttggcggtgttatcagcaaaagcctcggacgcatcgctggcagtttgctcggagccattgcggcactgcttcttgccgggcatacgctcaatgagccgtggttttttctattgagcatgagcgcgtggcttggcttttgtacctgggcctgtgcgcacttcacgaataacgtcgcgtatgcatttcaactggcgggctacacggctgccatcatcgcctttccgatggttaatattactgaggccagccagctgtgggatatcgctcaggcgcgcgtttgcgaggtaatagtcggtattttgtgcggcggcatgatgatgatgatcctgccgagcagttccgatgctactgcccttttaaccgcattgaaaaacatgcacgcccgattactggaacatgccagtttactctggcagcctgaaacaaccgatgccattcgtgcagcacatgaaggggtgattgggcagatactgaccatgaatttgctgcgtatccaggctttctggagccactatcgttttcgccagcaaaacgcgcgccttaatgcgctgctccaccagcaattacgtatgaccagtgtcatctccagcctgcgacgtatgttgctcaactggcccagtccgccaggtgccacacgagaaattctcgaacagttgctgacggcgctcgccagtagccaaacagatgtttacaccgtcgcacgtattatcgccccgctacgcccgaccaacgtcgccgactatcggcacgtcgccttctggcagcgactacgttatttttgccgcctttatctgcaaagtagtcaggaattacatcgtctgcaaagcggtgtagatgatcataccagactcccacggacatccggcctggctcgtcataccgataacgccgaagctatgtggagcgggctgcgtacattttgtacgttgatgatgattggcgcatggagtattgctagccaatgggatgccggtgccaatgcattaacgctggcagcaattagctgcgtactctactccgccgtcgcagcaccgtttaagagcttgagtcttctgatgcgcacgctggtgttacttagcctattcagctttgtggtcaaatttggtctgatggtccagattagcgatctgtggcaatttttactgtttctctttccactgctggcgacaatgcagcttcttaaattgcagatgccaaaatttgccgcattgtgggggcaactgattgtttttatgggttcttttatcgctgtcactaatcccccggtgtatgattttgctgattttcttaacgataatctggcaaaaatcgttggcgtcgcgttggcgtggttagcgttcgccattctgcgtccaggaagcgatgctcgtaaaagccgccgccatattcgcgcgctgcgccgggattttgtcgatcagctaagccgccatccaacactgagtgaaagcgaatttgaaagcctcacttatcatcacgtcagtcagttgagtaacagccaggatgcgctggctcgccgttggttattacgctggggtgtagtgctgctgaactgttctcatgttgtctggcaattgcgcgactgggaaagccgttccgatccgttaagccgagtacgggataactgtattagtctgttgcggggagtgatgagtgagcgtggcgttcagcaaaaaagtctggcggccacacttgaagaattacagcggatttgcgacagccttgcccgtcatcatcaacctgccgcccgtgagctggcggcaattgtctggcggctgtactgcagccttagccaacttgagcaagcaccaccgcaaggtacgctggcctcttaattacttaattacaccacaggcatagcgttcaccgccaccgcccagcggtttaggttgatcggacatattatcgccgccaacgtggaccatcagcgctttgtctttgatttcatccagacttttcagacgaggcgcgatgacggcatcggtagctttgccgtcattattgacgaccagtgcaggcagatcgcctaaatgcccggcaccttctggcccttcatgtttaccggtattttgtggatcaagatgcccgcctgcggattccgcggcgctggctttgccatctttggtggctggctggcagcttcctttggcatgaatatggaagccatgttcaccggggggtaatgctttcagatcggggctaaactccagacctttatcggtttcagtaatggtgacgctaccaatactctgccctaccccttggctcgtgacgaggttcatctcgactttttcactggcagcttgtgcgccggttgcaacaaccagcgccagaatagccagactaaaacgtttcataggacctccgttcattgtgcattcctgaataagtgtaaaccagtgacacatttttgaacggcggctattcctaaaagtgcttacggtacgtcgtaccccagtgccgctttacggatacgaaaccattgttgacgggtcattttcagtgtttctgcttcgacagctgcccgtacgcgctcaattttaccactaccgataattggcagcggctggcttggtaaacgtaatacccaggcgtaaaccacctgttcaatgctgcccgcgtttaactcctctgccaccacagccagttcatcacgcagcggctggaaataatcatcattaaacagacgaccaccaccaaggcaggaccacgccatcggacgaacacgcagttgttgtagttggtcgagcgtgccatccagcagtaacggctgatgcaccggggatatttccacctgattagtggcaagggtaaacggcagacgactttgcaacagggcaaattgcgcaggcgtaaagttgcttacgccaaaatgacgcactttgccgctctgatgcagatgtttgaacgcgtccgccacttcatcggcatccattaacgggtctggtcggtggattaacagcaaatccagatgatcggtcgcgagattaattaggctctgttcggcgctcttaatgatgtgatcgcggtcagtgatgtaatgaccaatgacgttttcttcacgcgcggtcgtcgcgataccgcatttactgacgatttccatccgttcacgcaggtgaggtgccagtttcagtgcctcgccaaacgccgcttcgcactgatagccaccataaatatcagcatggtccacggtggtcacgccgagatccagatgctcttcaataaaactgaccagctggcgggcggacatattccagtccatcaatcgccagtagcccatcacaaaacgggaaaactccgggccttgcggcgcaatagtaatacgctgaaccataatcgcttcctcttatcagatatgagaggagtatacgcaagattaggttcaaaagagacttggttgctccggttcgtcactactcgctggcttatttgcgcgtaatttgcgcattaatcgctgccgacaaaggcgcagcacctcttgtttttcgccatcgctcattttattccagttaaaacgctcatcacgactacgaaaacagccgcgacaaaacccgcgttcgtcagactggcaaattccccggcacgggctctggacgggaaagaactctaattgctccgccacttcgccctcctcagataagattattaccattattgaagctgttaatgtccaaagtagcaactttgcttgcactagaccgactggtctactacactccaacgcatgaacaaacacaccgaacatgatactcgcgaacatctcctggcgacgggcgagcaactttgcctgcaacgtggattcaccgggatggggctaagcgaattactaaaaaccgctgaagtgccgaaagggtccttctatcactactttcgctctaaagaagcgtttggcgttgccatgcttgagcgtcattacgccgcatatcaccagcgactgactgagttgctgcaatccggcgaaggtaactaccgcgaccgcatactggcttattaccagcaaacactgaaccagttttgccaacatggaaccatcagtggttgcctgacagtaaaactctctgccgaagtgtgcgatctgagtgaagatatgcgcagcgcgatggataaaggtgctcgcggcgtgatcgccctgctctctcaggcgctggaaaatggccgtgagaaccattgtttaaccttttgtggcgaaccgctgcaacaggcacaagtgctttacgcactgtggcttggcgcgaatctgcaggccaaaattagccgcagtttcgagccactggaaaacgcgctggcccatgtaaaaaacattattgcgacgcctgccgtttaacaggcattttttatcaccagacgaccgggagcctttatgagttctgaaaaactgtattccccactgaaagtgggcgcgatcacggcggcaaaccgtatttttatggcaccgctgacgcgtctgcgcagtattgaaccgggtgacattcctaccccgttgatggcggaatactatcgccaacgtgccagtgccggtttgattattagtgaagccacgcaaatttctgcccaggcaaaaggatatgcaggtgcgcctggcatccatagtccggagcaaattgccgcatggaaaaaaatcaccgctggcgttcatgctgaaaatggtcatatggccgtgcagctgtggcacaccggacgcatttctcacgccagcctgcaacctggcggtcaggcaccggtagcgcctagtgcacttagcgcgggaacacgtacttctctgcgcgatgaaaatggtcaggcgatccgtgttgaaacatccatgccgcgtgcgcttgaactggaagagattccaggtatcgtcaatgatttccgtcaggccattgctaacgcgcgtgaagccggttttgatctggtagagctccactctgctcacggttatttgctgcatcagttcctttctccttctagtaaccatcgtaccgatcagtacggcggcagcgtggaaaatcgcgcacgtttggtactggaagtggtcgatgccgggattgaagaatggggtgccgatcgcattggcattcgcgttagtccaatcggtactttccagaacacagataacggcccgaatgaagaagccgatgcactgtatctgattgaacaactgggtaaacgcggcattgcttatctgcatatgagtgaaccagattgggcggggggtgaaccgtatactgatgcgttccgcgaaaaagtacgcgcccgtttccacggtccgattatcggcgcaggtgcatacacagtagaaaaagctgaaacgctgatcggcaaagggttaattgatgcggtggcatttggtcgtgactggattgcgaacccggatctggtcgcccgcttgcagcgcaaagctgagcttaacccacagcgtgccgaaagtttctacggtggcggcgcggaaggctataccgattacccgacgttgtaatccaacattgcgagcggcgtaaagccgccgctatactaaaacaacattttgaatctgttagccattttgaggataaaaagatgcgtcttcttcataccatgctgcgcgttggcgatttgcaacgctccatcgatttttataccaaagtgctgggcatgaaactgctgcgtaccagcgaaaacccggaatacaaatacagtctggcgtttgttggctacggcccggaaaccgaagaagcggtgattgaactgacctacaactggggcgtggataaatacgaactcggcactgcttatggtcacatcgcgcttagcgtagataacgccgctgaagcgtgcgaaaaaatccgtcaaaacgggggtaacgtgacccgtgaagcgggtccggtaaaaggcggtactacggttatcgcgtttgtggaagatccggacggttacaaaattgagttaatcgaagagaaagacgccggtcgcggtctgggcaactaatctcctgccgggcgtgaactcatcgcgcccgcatctttactgcatcgacaagtaatatttgtcataatgcgcgctgcaatttatccgtattaagagaatcagatgtccgataacgctcaacttaccggtctgtgcgaccgttttcgtggtttttatcctgttgtgatcgatgttgaaacagccggatttaacgccaaaaccgatgcgctgcttgagattgccgccatcaccctgaaaatggatgaacaaggctggctgatgccggacaccacattacatttccacgtcgaaccatttgtcggcgcaaatttgcaaccagaagccctcgccttcaacggcattgacccgaacgatcccgatcgcggcgcggtcagcgaatacgaggcgctgcacgaaatttttaaagttgtacgtaaaggtattaaagcgagcggctgtaaccgcgccattatggtggcgcacaatgccaattttgatcacagctttatgatggccgccgcagaacgcgccagtctgaaacgtaacccgttccaccctttcgccacttttgacactgctgcactggccgggctggcactcggacaaaccgtattgagtaaggcttgccagaccgctggcatggacttcgacagcacccaggcgcactccgcgctgtacgacaccgaacgcactgctgtgctgttttgtgaaatcgtcaaccgctggaaacgtctgggaggctggccgctatctgccgccgaagaggtgtaatcgagtcgatgcctgatgacatgcaatgattcaggcatctatagtgaggctattccacgcatcctgcatgatattcacggggaatagcgttaatggcagataatccagaccctagtagcctcctgccggacgtgtttagtccggcgacccgcgactggtttcttcgcgcctttaaacagccgaccgctgtccagccgcaaacctggcatgtggcggcgcgaagcgaacatgcgctggtgattgcaccgaccggctccgggaaaacgctggcagcatttctctacgccctcgatcggctcttccgcgaaggcggcgaagatacccgcgaggcgcataagcgtaaaaccagtcgcatcctctatattagtccgataaaagccctgggcaccgacgttcagcgcaacttgcagatcccgttgaagggtattgccgatgaacggcggcggcgcggcgaaacggaagtcaatcttcgcgtagggatccgtactggcgatacgcctgcacaggaacgcagcaaactcacccgtaatccgccggatattctgatcaccacacccgaaagtctctatctgatgctgacctcccgcgcgcgcgaaacgctacgcggcgtcgaaacggtaattattgatgaagtccacgcggtagcgggcagtaaacgtggtgcgcatctggcgttaagtctggagcggctcgatgcgctgctccacaccagtgcacagcgaattggcctttctgccactgtgcgcagtgccagcgatgtggcagcatttcttggtggcgatcgcccggttacggtagtcaacccgcccgcaatgcgccatccgcagatacgaattgtcgtaccggtcgccaatatggatgatgtcagtagcgtcgccagcggcaccggcgaagacagccatgccggccgggaaggctccatctggccatatattgaaacgggtatccttgatgaagtgttgcgccatcgcagcaccattgtctttactaatagccgggggctggcggaaaaactgacggcacgattaaatgagctttacgccgcacgcttacagcgttccccgtctatcgccgttgatgcggcccatttcgagagcacctccggcgcaacctctaaccgtgtacaaagtagcgacgtttttattgcccgcagtcaccacggctccgtctctaaagaacaacgagcaatcaccgaacaggcgctgaaaagcggtgaattacgctgcgtggtcgcaacctccagtcttgaactggggattgatatgggcgcggtggatctggtgattcaggtggcaacgccgctttctgttgccagtgggttacaacgcattggtcgcgccggacatcaggttggcggtgtatctaaagggctgtttttcccccgtacccggcgtgatttagtcgattccgcagtcattgtagagtgtatgttcgcaggcaggctggaaaacctgacaccaccgcataatcctctcgacgtccttgcgcagcaaaccgttgccgccgcggcgatggatgcattacaggtagacgaatggtactcccgcgtacgccgtgccgcaccgtggaaagatctgccaagacgtgtttttgacgccacgctggatatgctttccgggcgctatccctctggcgatttttctgcttttcgccccaaactggtctggaacagggagaccgggatattgaccgcccgacctggcgctcaattgttggcggttaccagcggcggcaccattccggatcgtggcatgtatagcgtgttattacccgaaggtgaagaaaaggccggtagccggcgggtgggtgaactggatgaggagatggtatatgagagccgggtgaacgacattatcactctcggcgctaccagttggcggatccagcaaatcacccgcgatcaggtgattgtgactcctgctccgggtcgttctgcccggctccccttctggcgtggtgaaggtaacggacgtccggctgaattaggcgagatgatcggcgattttcttcatttgctggcggatggcgcgttcttttccgggactattcccccgtggctggcagaagaaaatacgatcgccaatattcaggggttgattgaggagcagcgcaacgcgacgggcatcgttccggggagtcgccatctggtcctcgaacggtgccgtgatgaaattggtgactggcgtattattttgcactctccctatggaagacgggtgcatgaaccctgggcggtggcgattgccgggcgaatacatgcgctatggggcgctgacgcgagcgtggtcgccagtgatgacggcattgttgcacgtattcctgacaccgatggtaaattgcccgatgccgcgatttttttgtttgaaccagaaaagttgctgcaaattgtccgcgaggcggtaggcagcagcgcacttttcgccgcccgttttcgcgaatgcgccgcgcgggcattattaatgccggggcgcactccgggccatcgcaccccgctttggcaacaacggctgcgcgccagtcagttgctggaaatcgctcagggatatccggattttccggtcattctcgaaaccctacgcgaatgtctgcaagatgtttatgatcttcccgcactggaacgtttgatgcgtcgcctgaacggtggcgaaattcaaatatccgatgtaacgaccactacgcccagccctttcgccacaagtttattgttcggctatgtcgcggaatttatgtaccagagcgacgccccgctggcagagcgccgggcatccgtactgagcctggacagcgagttactgcgcaatctactcggacaggtcgatccgggggaattactcgacccgcaggtcattcgccaggtggaagaagagttgcaacgactggctcctggcagaagagcgaaaggtgaagaaggattgttcgacctgctgcgcgaactggggccaatgaccgttgaagacctggcgcaacggcatacaggcagcagtgaagaggttgcgagctatctggaaaatcttcttgcagtaaaacgaatcttcccagcgatgattagcggacaggagcgtcttgcctgtatggatgatgccgccaggctgcgtgatgccctcggcgtacgactaccagagagtttgccagagatttatttacatagagtcagttacccgcttcgcgacctctttctgcgctatctccgggctcatgctctggtcacggctgaacaactggctcatgagtttagtctcggtattgccattgtcgaagagcagcttcagcaactgcgtgaacagggtctggtgatgaatctgcaacaagacatctgggtgagcgatgaagtatttcgtcgtctgcgtttgcgcagcctgcaagccgccagagaagcgacgcgtcccgttgcagccacgacctatgcgcgattgctgctggaacgtcagggcgtattacccgccaccgatggtagcccggcgctctttgccagtacaagcccaggcgtttatgagggcgtagatggcgtgatgcgggtgatcgaacagcttgccggagtcggtttacccgccagtctctgggaaagccagatcctgcctgcccgcgtacgcgactatagcagtgaaatgctcgatgaattactggcaaccggtgcggttatctggagcgggcaaaaaaaactgggtgaagatgacggcctggtggcactgcatctacaggaatatgctgcagaaagcttcactcccgccgaagcggatcaggcgaatcgtagcgcgctgcaacaagcgatagtcgctgttctggctgacggaggagcctggtttgcacaacaaatcagccaacggatacgcgacaaaatcggcgaaagcgttgatctctctgccctgcaagaggcgttatgggcgctggtctggcaaggcgtcatcaccagcgacatttgggcaccgttacgcgccctcacccgcagcagttccaacgcacgcaccagtactcgccgcagtcaccgggctcgtcgtggacgtcctgtctatgcgcaacccgtcagcccgcgggtatcttacaacacaccaaatctggctggacgctggagcttattgcaggtggagccactaaacgataccgaaaggatgctggcgctggcggaaaatatgctcgaccgctacggcatcatcagtcgtcaggcggtgatagccgaaaatatccctggcgggtttccaagcatgcaaacgctttgtcgaagtatggaagactccgggcgaattatgcgaggtcgttttgtagaaggtctgggtggcgcgcaattcgctgaacgtctgactattgaccgattgcgcgatctggcgacacaagccacgcaaacgcgccactatacaccagtggcgctctctgccaacgatccggctaatgtgtggggaaatcttctgccctggcctgcacatccggcaacgctggttccaacgcgtcgggcgggtgcgctggtggtcgtttctggcggcaaattgttactctatctggcgcaaggtggcaaaaaaatgctggtctggcaggaaaaagaggaattactcgccccagaggttttccacgcgctgactaccgcactgcgtcgcgaaccacggctgcgctttacgctaacagaagtgaatgatctaccggtccggcaaacgccgatgtttacgctgctgcgtgaggcgggatttagtagtagcccacaagggctggattggggataaagaaaggactgacggatgcccgttcgcatccgtcagtattgcaggacggattattccgcgtccggctcttcagacttgtatttagcggcagtttctttgatcagctgctgcagttcgccacgctgatacatttcgatcacgatatcacaaccgccgaccagctcgccgtcaacccacagttgcgggaaggtcggccagttagcatatttcggcagttccgcacgaatgtccggattctgcagaatatcaacataggcaaaacgttcgccacatgcggcaagcgcctggactgcctgggcagagaaaccgcagctcggcagtttcggactacctttcatgtacagcaggatcgggttttcagcaatctggcgttggattttttcgatagtggtgctcattgtcttgcttcctcaaacttctttacggcagtaatctgacattgtagcgggtcagtgcggcatcggaaaataacattttcatcacgcttttgctattttatccctttgctctatttgttgcatttcaaatattcgtttcttctctgatgccggcaaactggcgtatttataaccatttttagctttcactgctgcatttttttgcgctcgccaacgaaacgtattttttaacaataaaagctattaactttctcttcttctatgcattagaatcatcaagttttgtaaatcagacgcaggcatgatagacctgcctttacagagggacgctcagtggcgcggataaaccgtattagcatcacgctctgtgctttactttttaccaccctgcctttaacgcctatggcccatgctagtaagcaagccagggagagttctgctaccactcatatcaccaaaaaagcagataaaaagaaaagcacggcaaccaccaaaaagacccagaaaacagcgaaaaaagccgccagtaaaagtacgaccaaaagcaaaaccgcttcttccgttaaaaaatcttccattaccgcttctaaaaacgccaaaactcgcagcaaacacgccgtcaataaaacggccagtgccagctttaccgaaaagtgtaccaaacgtaagggctataaaagccattgtgtgaaagtcaaaaatgccgcgagtggaactcttgccgacgcgcacaaagcgaaggtgcaaaaagctacgaaagtggcaatgaataaactgatgcagcaaattggtaagccatatcgttggggtggcagcagtccgcgtaccggttttgattgcagcggcctggtttattacgcttataaagatttggtgaaaattcgtattccgcgtacggcgaatgaaatgtatcacctgcgtgatgcagcgccaatcgaacgtagtgaactgaaaaacggcgacctggtctttttccgtactcagggacgcggcacagccgatcatgtcggcgtgtatgtcggcaacggcaaatttattcagagtccgcgcacaggtcaggaaattcaaatcacttctctcagtgaagactactggcagcgccactatgttggcgctcgtcgggtaatgaccccaaaaacacttcgctaaaactttaccctgttgttacggcaacagggtaagttcatcttttgtctcaccttttaatttgctaccctatccatacgcacaataaggctattgtacgtatgcaaattaataataaaggagagtagcaatgagtttcgaattacctgcactaccatatgctaaagatgctctggcaccgcacatttctgcggaaaccatcgagtatcactacggcaagcaccatcagacttatgtcactaacctgaacaacctgattaaaggtaccgcgtttgaaggtaaaagtctggaagagattattcgcagctctgaaggtggcgtattcaacaacgcagctcaggtctggaaccatactttctactggaactgcctggcaccgaacgccggtggcgaaccgactggaaaagtcgctgaagctatcgccgcatcttttggcagctttgccgatttcaaagcgcagtttactgatgcagcgatcaaaaactttggttctggctggacctggctggtgaaaaacagcgatggcaaactggctatcgttagtacctctaacgcgggtactccgctgaccaccgatgcgactccgctgctgaccgttgatgtctgggaacacgcttattacatcgactatcgcaatgcacgtcctggctatctggagcacttctgggcgctggtgaactgggaattcgtagcgaaaaatctcgctgcataataactgatggcaaatgcagcattgcctgaagcgctacgcttatcaggcctacgcggatcatcgatgtaggtcggataaggcactcgccgcatccggcaagataaatcgcacgttgtcagcaactgtaacgcagaaggttatccttctgcgtttttgtttaattagctgttagcaacgcaaactgtttcaggttgttttctggcactcataaacaccagcaataatgccagtcccgcgacaatcgctcccatcaccggcacaaagctgtatcccagcccagcggaaattaccgcaccaccagcagctgctcccagcgcatttccaagattaaaggcaccaatattgacactactagacagacctggcgcttcactggcgacacgcatcacgcgcatctgtaacggcggtacgaccgcaaaggttgctgcgccccacaccaccatgctaatagctgcgccgaactcattgcgggccaggaacgggattgccagcataatcaccatcaacaacaacaaaaagcctttcaacgtgccgttaacactacgatctgccagtttgccgccgagatagttaccgatagagaatccgacaccaatcagcaccagcattgccgtgacgaacaccggtgttgcgtgggtaatactttgcagtaccggagagatataggtgtagagagtaaacattgcaccagctcccagtaccgtcgtcagcaatgcagacagcacctgcggacgcattaataccgccagctcttttttcacttcaggtcgtgcccctgcaccacctttaggtaaactgaagaacagacttaccatactaatcactcccagccccgccgttgccagaaaactcatccgccagccgatggtttcacccaaccaggtcgccgccggcacgccaccgatatttgccagggttaaccccataaacatagtggcaactgcgctggcctgtttatgttttggcaccacgcttgcggccacgacactacccaaaccaaaaaatgctccgtgattcaggctggtcaaaatgcgactaagcatcagggtcatataatccggcgcgatggcggaaagtacgttgccgagcgtgaaaattgccatcaggaaaatcaacgcactgcggcgggcacgatgagaaagtagaagcgtcatcagcggcgcgccaaccattacgccaactgcataggcactgattaacattccggcagcgggaatgctgacatccacaccgcgcgcaatgacgggcaacaagcccattgggctgaactccgttgtcccgataccaaacgcgccaatcgccagcgccagcaacggatagttaattttcatgccttatctccacctcttcgcgtcattacgcgatattcattaaagtggcgaaagcatgacagcaatcacaaaaaaatgaaaataacaaaaagagaaaacacttttgccattttgctaacaaacaggaaggagatgcgagggagaacgcgctccctcgagaggaaatcagtgcagcgcggcagtcaaacccacggctacgatcaaaccgaggacgataatcgttgttaccagtgaaaatttaaggtcggtgctcatcaagttttctccttttttattaccacacaaaaagtgatattacgcatttttacacactgtgatgaaaaaatctcccgtcatttataatgataagtgtttttaccacttccccttttcgtcaagatcggccaaaattccacgcttacactatttgcgtactggccattgaccccttcctgacgctccgtgtcgtttttccggcgtaccgcaacacttttgttgtgcgtaaggtgtgtaaaggcaaacgtttaccttgcgattttgcaggagctgaagttagggtctggagtgaaatggaatggcaacaataaaagatgtagcgaaacgagcaaacgtttccactacaactgtgagtcacgtgatcaacaaaacacgtttcgtcgctgaagaaacgcgcaacgccgtgtgggcagcgattaaagaattacactactcccctagcgcggtggcgcgtagcctgaaggttaaccacaccaagtctatcggtttgctggcgaccagcagcgaagcggcctattttgccgagatcattgaagcagttgaaaaaaattgcttccagaaaggttacaccctgattctgggcaatgcgtggaacaatcttgagaaacagcgggcttatctgagcatgatggcgcaaaaacgcgtcgatggtctgctggtgatgtgttctgagtacccagagccgttgctggcgatgctggaagagtatcgccatatcccaatggtggtcatggactggggtgaagcaaaagctgacttcaccgatgcggtcattgataacgcgttcgaaggcggctacatggccgggcgttatctgattgaacgcggtcaccgcgaaatcggcgtcatccccggcccgctggaacgtaacaccggcgcaggccgccttgccggttttatgaaggcgatggaagaagcgatgatcaaggtgccggaaagctggattgtgcagggtgactttgaacctgaatccggttatcgcgccatgcagcaaatcctgagccagccgcatcgccctactgccgtcttctgtggtggcgatatcatggcaatgggcgcactttgtgctgctgatgaaatgggcctgcgcgtcccgcaggatgttagcctgatcggttatgataacgtgcgcaacgcgcgctattttacgccggcgctgaccacgatccatcagccaaaagatagcctgggtgaaacagcgttcaacatgctgttggatcgtatcgtcaacaaacgtgaagaaccgcagtctattgaagtgcatccgcgcttgattgaacgccgctccgtggctgacggcccgttccgcgactatcgtcgttaatcacccgttgcgggagtctcttccggctcccgcagccactccttattcagcgtctcactatcgccgagatactcaagcaaccaggttaacgcagggctcatatcattttgctgccatgtcagacaacatgcgctatccggaaaggggttttccagttctaatgctacccacttcccctcattaagccacggtttggcgaaatgtgttggcaccatccctatgcataatcctgcgctgatacaggttgcgctactttcccagtcaggcacgacaactcttttttggttatccagcaaccaggtaatacgtttaggtagcgttcggctggtgtcttcgcgcaccaagctcggccagttgcgcaacgtatcatcgctgaacgggccatccatcaacgccagcgggtggtgactggcaacaacgcaactccagcttagcatccccatatcccggaaggcataacgaccgcctaccggaatcgcgcgtgttgcgccaatcgccagttccacgcgcccgtcggaaagcgcatcccagacaccgttgaacacttcctgaaagacaagaagttcgacatcatcaaaatggcgataaaaatcaacgatcatctgccgtgtacgttctggcctgacaatattatccactgcgatagctaactgaccgcgccagccgttcgctatctgctgacattgctggcgggtgatctgcatttttttgacaacagagcgcccttctttgagaaaccacgctccagcagcggtcagctccacatcacggtgccgtcgttcaaagagcggcaccgccagccactcttccagctgacgcacggtatagctgaccgcagaaggaacgcgatgcagctcctgtgccgcagcgctaaaactaccattacgcgctaccgcatcaacaacttcgagactatattcactccacatagtctgcctgcaaaatttttgaaaccagtcatcaaatattaccgtttcacaacactaatttcactccctacactttgcggcggtgtttaattgagagatttagagaatatacatgcaacctgggaaaagatttttagtctggctggcgggtttgagcgtactcggttttctggcaaccgatatgtatctgcctgctttcgccgccatacaggccgacctgcaaacgcctgcgtctgctgtcagtgccagccttagtctgttccttgccggttttgccgcagcccagcttctgtgggggccgctctccgaccgttatggtcgtaaaccggtattattaatcggcctgacaatttttgcgttaggtagtctggggatgctgtgggtagaaaacgccgctacgctgctggtattgcgttttgtacaggctgtgggtgtctgcgccgcggcggttatctggcaagcattagtgacagattattatcctagtcagaaagttaaccgtatttttgcggccatcatgccgctggtgggtctatctccggcactggctcctctgttaggaagctggctgctggtccatttttcctggcaggcgattttcgccaccctgtttgccattaccgtggtgctgattctgcctattttctggctcaaacccacgacgaaggcccgtaacaatagtcaggatggtctgacctttaccgacctgctacgttctaaaacctatcgcggcaacgtgctgatatacgcagcctgtagtgccagtttttttgcatggctgaccggtagtccgttcatccttagtgaaatgggctacagcccggcagttattggtttaagttatgtcccgcaaactatcgcgtttctgattggtggttatggctgtcgcgccgcgctgcagaaatggcaaggcaagcagttattaccgtggttgctggtgctgtttgctgtcagcgtcattgcgacctgggctgcgggcttcattagccatgtgagcctggtcgaaatcctgatcccattctgtgtgatggcgattgccaatggcgcgatctaccctattgttgtcgcccaggcgctgcgtcccttcccacacgcaactggtcgcgccgcagcgttgcagaacactcttcaactgggtctgtgcttcctcgcaagtctggtagtttcctggctgatcagtatcagcacgccattgctcaccaccaccagcgtgatgttaagtacagtagtgctggtcgcgctgggttacatgatgcaacgttgtgaagaagttggctgccagaatcatggcaatgccgaagtcgctcatagcgaaagtcactgatctatatcgatatacttatacttaggctgctaacaaaattttgttgtatgattgaaattagcggcctatactaatttcgagttgttaaagctacgataaatattatgtttttacggggacaggatcgttcccgactcactatggatagtcatttcggcaagggttcctcctttccctctgttctacgtcggattatagactcgcggttttttctgcgagatttctcacaaagcccaaaaagcgtctacgctgttttaaggttctgatcaccgaccagtgatggagaaactatgagtagtagctgtatagaagaagtcagtgtaccggatgacaactggtaccgtatcgccaacgaattacttagccgtgccggtatagccattaacggttctgccccggcggatattcgtgtgaaaaaccccgatttttttaaacgcgttctgcaagaaggctctttggggttaggcgaaagttatatggatggctggtgggaatgtgaccgactggatatgttttttagcaaagtcttacgcgcaggtctcgagaaccaactcccccatcatttcaaagacacgctgcgtattgccggcgctcgtctcttcaatctgcagagtaaaaaacgtgcctggatagtcggcaaagagcattacgatttgggtaatgacttgttcagccgcatgcttgatcccttcatgcaatattcctgcgcttactggaaagatgccgataatctggaatctgcccagcaggcgaagctcaaaatgatttgtgaaaaattgcagttaaaaccagggatgcgcgtactggatattggctgcggctggggcggactggcacactacatggcatctaattatgacgtaagcgtggtgggcgtcaccatttctgccgaacagcaaaaaatggctcaggaacgctgtgaaggcctggatgtcaccattttgctgcaagattatcgtgacctgaacgaccagtttgatcgtattgtttctgtggggatgttcgagcacgtcggaccgaaaaattacgatacctattttgcggtggtggatcgtaatttgaaaccggaaggcatattcctgctccatactatcggtagcaaaaaaaccgatctgaatgttgatccctggattaataaatatatttttccgaacggttgcctgccctctgtacgccagattgctcagtccagcgaaccccactttgtgatggaagactggcataacttcggtgctgattacgatactacgttgatggcgtggtatgaacgattcctcgccgcatggccagaaattgcggataactatagtgaacgctttaaacgaatgtttacctattatctgaatgcctgtgcaggtgctttccgcgcccgtgatattcagctctggcaggtcgtgttcagtcgcggtgttgaaaacggccttcgagtggctcgctaaaggctattctatcgccccctctccgggggcgatttcagatcaggcttctgtgcctggttgattcatggcattttctcgtgccgccagcacacgttctaccgtatctaccactgcctgagtttgtggatcgatttcaatgttgacgcgtgcgccaagttttttcttcccaagagtcgtgcgttccagtgtttcccgaattaaatggacgcaaaaacgcgttggcgtgacttcgccgacggtcaggctaataccgtcgatgccaataaatcctttgtacagaatatatttcatcaactgactatcctggactttaaaccagatctggcgattattttcactggttaatattttcgccacttcagcagtggtcataatatgaccactcattaagtgtccgccaatttcatcactgaatttcgccgcacgctcaacgtttacccaatcccccacttttaaatcgccaagattggtaatgcgtaacgtttctttcatcaggtcaaaactgacatggttgccgttaatttccgtcacggtcaggcagcaaccgttatgcgccacggaagcaccggtttccaggccgtccagcatgtggtcgggtaactccaccacatgcgtacgaaaatttggtttctcgtcaatgctcaccagttttgcggtgccctgtacaatccccgtaaacatacttacaactcctgaaatcagttaagacattctgttcagcacaatagcaggtggaaaacgcccttaccagtgaaggggtaagaatggctattttttcactggagaattaataaatcctcgctacaatagactgaatttcccctgcttcttctttttgctgcccattcaggcggctttttagtctctcatataactacaaataaaaggtgttcacgtgcagaagtatatcagtgaagcgcgtctgttattagcattagcaatcccggtgattctcgcgcaaatcgcccaaactgcgatgggttttgtcgataccgtgatggcgggcggctatagtgccaccgacatggcggcggtcgctatcggtacttctatctggcttccggcgatcctctttggtcacggactgctgctggcattaacgccggttatcgcgcaattaaatggttccggtcgacgtgagcgcattgcgcatcaggtgcgacaaggtttctggctggcaggttttgtttccgttctcattatgctggtgctgtggaatgcaggttacattatccgctccatggaaaacatcgatccggctctggcggacaaagccgtgggttatctgcgtgcgttgttgtggggcgcgccgggatatctgttcttccaggttgcccgtaaccagtgtgaaggtctggcaaaaaccaagccgggtatggtaatgggctttatcggcctgctggtgaacatcccggtgaactatatctttatttatggtcatttcggtatgcctgagctcggtggcgttggttgtggcgtggctactgcggcggtgtattgggtcatgttccttgccatggtttcttacattaaacgcgcccgctccatgcgtgatattcgtaacgaaaaaggcaccgcaaaacccgatcctgcggttatgaaacgactgattcaactcggtttgccgattgcgctggcactgttctttgaagtgacactgtttgccgtcgtggctctgttagtgtctccgctcggtattgttgatgtcgcaggacaccagattgccctgaactttagtagtctaatgttcgtgcttccaatgagcctggcggcagcggtaactatccgcgtaggttatcgtctgggtcagggcagtacgctggatgcgcaaaccgctgcgcggaccgggcttatggtgggtgtctgtatggcaaccctgacggccattttcacggttagtctgcgggagcaaatcgccctgttgtacaacgacaatcccgaggttgtaacgctggctgcgcatttgatgttgctggcggcggtatatcagatttctgacagtatccaggtgattggcagtgggattttgcgtggttataaagatacgcgttccattttctatattacctttacggcttactgggtgctgggcttgccaagcggctatattctggcactgaccgatctggtcgttgaacctatggggccagcaggcttctggataggctttattattggcctgacgagcgcagccattatgatgatgttgcgtatgcggttcctgcaacgtctgccgagtgccatcattctgcaacgagcatcccgctaataaagacaaggcgcaaccttcacgggttgcgcctgtatttttacgcaggctggagcgttgcgccaatcccgtcttcgtctggctgtaatttcagagcgttacacagagtttgccgactggcatctgttatctcaacgtgtatatccccggtaacttcccctttcacattgatgaagtcaggactaatttcttttgcactggtttgcaggcaaatcgctccctctccgcgcaggcgtttcactttcagttgcacatgcgttgccgcatcagtgatcagccacagttttccaccattcagattgatgttaccaacaatgaaagtgacactgtcaccttttaccgtactgccgtctagaatcaacacaccgccctgctgtacagtaatcgtactttgttgcagctctgcgccataaccaataatcatactagcgccgtccagtaatgcaacactcccggtcagttcaaccggtgcgcgatcttcctctacgacaaaattttcgtccgcgctggtgggactcaacaggatcactgtcccaccttgtattaccgcgttttccagcgtaccggcatgcacttcagcccgaccacccacattcacggacaggttttgcgtcttaccggaactgtagagctgaaggccatccgtccccagacgataaatggatccattctcaacaatagtgtcagagtcttcaccaccgagattattcatggtgccaccagcaagcaacgtatcactggctttcccggccagcataaaaacgccgccctgattaatctcacaattgctggcttccccacctggatacaccaacaattcaccaccttcatctaccacgaccgcactggttgtcccattaaccaacaggccgccctcttgatcgagaatgattttttccgcgcgatgtccttccagtacacgcaggttaccgccattttccagcaacaaaccgcaggcataacctttatcaacgctgaattcaccttcgggatggcggccattaaccgtagcgagcgtagagagactaattgcgcctccctcggactgaacaatatctgtggcaatggcaccatcgctgacgcttagcgtgccattgttaccgtactgtgtgcatttggcgatcccaccggttgccactttcaaccagccagcccccgtgaccacggtattttcggctcttccgccagcttcaacaatcaactcgccttcagtaagttgcgtcgcgccaatgacctcgccggtcttaacaatttgcacgttcccgtcgctcatcaagtttttcgcatcagatcccatgatttattcctttgctgcatctgtgtgcctttattgctacctaagtgtaaaggctacggaggatttatccacgacagatttgagatggtggcaaacaactctgtttaaactctgatacacgaattattgggttgtatcagatgtaaatgcgatcctgaataaaaatcacccttgcaaatcaacaaaatatagccaatttgcttaaaagctctgcaaacggtcgaaatagcgcagaaaattacgttttgcctcttgccaccttcccactctgccgctaatattcgtccccgttgtcacctacaacgttgcgttcatagctcagttggttagagcaccaccttgacatggtgggggtcgttggttcgagtccaattgaacgcaccatcctgcgtccgtagctcagttggttagagcaccaccttgacatggtgggggtcggtggttcgagtccactcggacgcaccagattttcttaatctggtcttctcctttttccctctgtttcttctctgtatccaatacgttaaaagatttacactgtcttcgtatgcgttatcagaaggagaatcgctatggcaactttgttacaacttcattttgcttttaatggcccatttggcgacgcaatggctgagcagcttaaaccacttgctgagagcattaatcaggaacctggttttctgtggaaggtatggacagaaagtgaaaagaaccacgaagccggtgggatctaccttttcactgatgaaaaaagcgcccttgcctatctggaaaaacatactgcccgactgaaaaatctcggcgttgaggaagttgtcgccaaagttttcgatgtcaatgagccacttagtcaaatcaatcaggcaaaactcgcctgacagaatttaatcaagggcggttagcgcccttttcatccctgtctgaaatttctcaaattctaaaaatctcaaccaaacttatctgataacactaaattcgaaagaatgcgtacaggtaagtaacaatgaaaaaaattgctattgtgggtgccgggcctacggggatctacaccttattcagccttctacagcaacaaactccactttctatttctatcttcgagcaggctgacgaggccggtgtcgggatgccatacagtgatgaggaaaacagtaaaatgatgctggcaaatattgccagtattgaaataccgccgatttattgtacgtatctcgaatggctacaaaagcaagaagacagccatctccagcgttatggcgttaaaaaagaaaccttgcacgatcgtcagtttttaccgcgaattctgctgggcgaatatttccgcgatcaatttttacgactagtagaccaggcacgacagcaaaaatttgcagtggctgtttatgaaagttgccaggttaccgatctgcaaattacaaatgctggcgtcatgctcgctacaaatcaggatttacccagcgagacgtttgatttagcggtgatcgccacgggtcacgtctggcctgatgaagaagaagcaacccgaacgtattttcccagcccgtggagtggcctgatggaagcaaaggtcgatgcgtgtaacgtgggtattatgggaacatccttgagcggactggatgcggcaatggcagtggctattcagcatggtagcttcattgaagatgataaacaacacgtcgtttttcaccgcgataacgcaagtgaaaagctaaatatcacgttgttgagccgcacgggtattttacccgaagccgatttctattgccctattccctacgagcccttacacatcgtcaccgatcaggcattaaatgctgagattcaaaaaggcgaagagggccttttggatcgggtatttagattgatagtagaggaaatcaagtttgctgatccagactggagtcaacgcatagccttagagagcctgaatgtcgattcctttgctcaagcctggtttgccgagcgcaaacaacgcgacccatttgactgggcagaaaaaaatctccaggaagtcgaacgcaataaacgagaaaaacatactgttccctggcgttatgtcattctgcgcctgcatgaagccgtacaggaaattgttccacatctgaatgaacacgaccataaacggttcagtaaaggccttgcccgggttttcatcgataattatgcggcaatccctagtgagtctattcgtcgcctacttgccttacgtgaagcgggaatcattcatattctcgccctcggtgaagactacaaaatggaaattaatgagagccgcaccgtcctgaaaacggaagacaacagctacagctttgacgtttttattgatgcccgcggacaacgtccgcttaaagtgaaagatatccctttccctgggctacgcgagcaattacagaaaacaggggatgaaatccctgatgttggcgaagattatacgttacagcaacccgaagatattcgtgggcgcgtagcgttcggcgcgttgccctggttgatgcacgaccagcctttcgttcagggacttacggcatgtgcagaaattggtgaggcgatggctcgggcggtcgtaaagcctgcatcccgtgctcgtcggcgtcttagctttgattaaaggtaaagctatcagcactcaacaaactgatgctgttcattaagacgatagcggactccggctcgaatattgttttcaccttcaatggcgacggcgaagcgaactctttcgccgtcatgatatgccagtgcggcgcttcctcctggcccgagaataatactgtcgaccacgcccgtgctcactaccgtactattttcaccgctggcaatgatgtgtacattgtcgccgctgttggcaattctggcgtttgcgccaaagctggcgatttgcaccaggtcaccattactggcgacatgacaccgttcacccaatgtacaaacgcgtactcgcattccggtattcgcaatccgactgctatctccagcgctgcttatccggctagaattaccggttacagcaacccgtgcgcgttcaccggagctgccaatgtgactgttaaagccgacacttccaatccgcacgctataacccatactggcaatttgcgcggcatacccagcggttgcgattctggcgttatcctcacaacagccgatgcgagcatgatcgtcgctgcgggcaaactgactgcaaaatggtctctctccggggtctgtggccagtttttgcatagaggaaacttcctgatgcgcgaagttttcatccgccagccattttttccacgcatactcaaccagactctccgcccagtccgtatatccttcctcaatcagtgcatgatgaatatcggcataactaccgccgcgtgggaaatggcgcaggaaccagcgatacatcaccgctccgatacgccattctcgcaggtctgcttgtgtaatgatcattcgttagtgccggtgatagccatcgaccatgcttttaaaggtttcgtgtggcgtacgccccgtggtgcaaagataaagatgaccgaagataaaaaagaggcttataaatgccagagcaaaatgtgtctgcaataaccagtatcttacgccaggaaacacatctcccacggcttgcggatagagacacagcagccccgtcaatagtaacaacggcagcaatccatacatgacaccaacataggcgacctgctgtaagggattaaatttagactgggttgttgccgggaaaggatgttcttccccctgcataatgccaaacaaataaaatcgcgtttgttttgccgctcgttccagccacccctgacgacgaatgcgatagtggtgaccattatccccaacggcattgatcagcacaaagccgagccagcatgccagtaacaaaaatccgcaaacttcatgcaccgcaaccagacttttaaccgcagttgcgcccaccatcgcaaagtgatttatcagcccactggccagcaacaatacaaagagtaacgcattgctccagtgccataatctgaccgctttgctgtaaagataaatcttctcaccatgatcggtggcacttttcttcacgccacgagcacgaagcaaggcatgcagccccagcaccaaccacatcccaaccagcaatactccggcaatgatcaaccacaccggccaaaattcgggagtgaactgtggcacatagttcgctaactggctctgaaactgttcagcatgttggctcgggttcatacattttcctttttaatcaaatgttgaccgaaccggcgatacagatgcggtttcccggcaccaggtagctgatattgatagtatttattttgctgcaaccacgcctgaatttctgggctatcttcgcgaccaaagatcaatgcgtgttccgggcaggcgctgacgcaaatgggcggaaagccttttgccagtcgggactcagcgcagaaatcacatttatctgccactttagtgacagggttaaggtagcgaacctggtacggacaagcgccaatgcaataactgcagccgatgcactggcttttttctacccgcacgatcccctgctcatcacgccagctcgcccccgtcgggcaaacgtcgatgcacggagcatcttcgcagtgctgacaactctggcgaaaaaagtgatactgcgtttcgttgtcgttatcggtgactggaatgtgtgctatgcttaaacggcttccctgagcggggacgtggttagttttacggcatgcgcgggcgcaaatattacagccattgcaccgactctcgtcatgaatcatggcataccgaacttccttttcttgcctcgtgttcgctaacagagaagacgcagaaccagtaaaaaagattactgttcccatccccagaacaaatttgcgtcgagtgaaggacatctgattatcccctaatgcagtggctgcaactgtccaccctatccatgacatctccctgaaatttcaggggttctgaaactgctctacctcgaaccattcgcataagccataagccttgccataggtcataaatcgctcgctaaacaagtacaacaccgccgtgctactctccacctgccgtatatcggcatattcaggtgcaacatccatcgcggcgatcgcggcttcaatctgcgcttcctggaagtaatatggcgcttgcatcagcatggcgactttgtaaggacgaggatacgtctggcactcaaaacgaacggcgtgtgcaatggcgcgacaaatgtcctgctccacaacttgcaaagacatcgccgcgtagttttcactcatggcctgcgtactgtaatagtaatcatccttgcttcccgtcaaacaagcgatatccgcgtagtctccgttctgcttaatgctttccagcaaaacactcagttcctcttctgcaaccaaatagggtgggctgagaaacacggcgcgcgccaccagctgcccagccgcagaatgctggcgaatgaactcagccaggatttcagcaggttctggttcggttaccgtatcaacggggtgacgcatcccctgcaaccattgccgcttcgcctcgtcaacttcgctgactttcgctaacggcaattcatcctgatggttcatcttacccattccttacgcaggcagtagattgtgtgctgccagatcggcggcaatatcttccagccccagacgctgcaatgtttcgcgggttggacaaccaagctgtgggtcccagcccatttctttgtagaacatcgtgaggctagcatgcatatcgtcacgatccattttgtcagtaccttcagtaaagaccgggatctgcggatccttgtcgaatacccaggaacagataagatcgtgttcattacgcatatctttggtttgcatcagttttaccgtgtaggcacgatgcaacgtaaaaatacgctctgcagctaaatctaatttttcctgagtcatctcttcgccggtgatcgctttgaagaatttggcttcaagcgccagatcgccccggtaattacggcttttcagcgggctaacggtcattggccagacccagttgcacagggtgacggcgttatgcaaacagacccgcaacaggctccactttgcatatttaatttttgcgtcattgattggcgtgtagtttttggtttcatcgtaagcatcttcagaaccaaaaagttctttcgccacttcacgttgcagtttcaatggcaagccggaaccaataaagttgatatgggtatgcgtcatgcagtcacggttgaacatacagttaacaatggaaccgacctgcgcactcgcttcattggcatggtgaaccggatagccaaacgggctccagagtttatttttcgcgtagccccagtactcttcacccaaattccagcgttctgcgatggcataactaccatcagccaggtgactcagctcacccacacgatgcgccagacggtagtaaaaatctttaatgaagttaacgtcacccgcttccagttgatcccagcgaatttctgcatactcttcagctggcagaacacgcttgaacacacctttgctgtaacaataagtaaagtcgcgatgcaactgcccgtagttacaccataggccgtagtcatcgaacaaattcagacccaccaggttaccaatcacacgaccatcgtctttatcttcaaaatctttcggcccgttcgggaagatggtggtatggacaaagtttgctacacaagtgttaccacctgtgctgggcacgccaaactctttcacccgaggaatattcatttgggtcatacaacggatcgggcaagagtggcagccgctcatttttactgtgtatttctctgccgccggtcctaagtcaaaaacggatttataggtacgaaagccgaccgtattctgattgcctggcggaatttcacccgtttcaatcggaccaccttcagccgcgccccaaaacagccctttacgtgctgtccagcgactcttgggatcactatactctgcccagctttgtggcgtacttggcacgacatggttgttattcgcaccaataagttcagtcatcatgtaatcattgagacgcttcatctcctgacgatcggcaatgttgacccctttcgtcccttcaaccgcaatcgctttcaggtttttgctacccattattgcgccagttcccgcaccgccgctgtggttacggctattcaacatgccagagagaggaacaaggttttccccagcctgaccaatagccgccacacaggtttccggactggtcaatcgacaaatttcttccgtcgttgcgcgcgtcccttttccccataagaaatcggctttttccaggctaactttgtcatctttaatcttcagccataccggacttttcgccttcccttcgataataatgacgtcgtatccagcgaatttcatttgcgctgcaaaaaagccacccatatgggcatcgacgactaaatttcctttggtaaaagtagaaagactggtgatatttacgcgagaactacagggggcaccagatccagttaatgggccggtagcaaagactaatttattcgcttcatcgaaaggtttcgtgcctggcggtacttcgtcatacataattttgtagccgaagcccatgccaccgacaaaacttttaaacttactggaatcttcgagggtaatatttcctgtcgtgagattgactcttaatatattacctgtccaaccgttagccatgattttttcctttgcaagattcacacagtaatatctttccactcgataatttttaacgcccctgttgggcaggcgtttgcgcattcaccgcataacacacatttgctggattttttactttcggtatttacggtggccatcatccacgggcatgccgtagtacaggcgctacagccaatacagcgtttatgatcgacggtaatacagccttctttctgctgccaggtaatcgcaccaatcgggcagacgttcatgcattgcggctctttgcattgacggcaggtgtccgcggtatagttgagatcgccatacaggccgccgccagagccaaccccgttgtcgccaaagaaataattgcgatggattttgatacgggagaagaatgtccctacactgccatcgttgaagttggtacaagagatttcacagcggtggcaacccgtgcatcgcgctcgctgggtcaccagcacccctttgggggtatttatcaaccctactgtgccgctatcaatatcttcctgtttgcaacccaaaagactcagtaacgcaggggcaattgttagaccagcaaggccttttccacttatacgcaagaattctaatcgcgttaagccaatatctaatagtggacgatcaaccgggttcatttatttcgcatcctcttcgcaaacacagtgctgacaattcagcagcctgatattaagcattcaactaatacgctgctgactctgtccccaacaccagatattttccctaacccgatagtgtatgagaaaagattaacgccgataaactaatcctttatggttaggagaaaaaataatgtgattattctgagcccttaacattgatcgttatcaattaaaattacaaagcaagaaattataagtgaactgatatttattatcatttgaaataaatttaacttaagcgacaattatttgtgactttcattgcagaaaataaaaataacattatcgctataaattaaaatacataccgaaattcgtataatttcagcagttgttatttagaatgattaactggaccgcaactgaagcaagaatatcaggatgaagcttaccgcctcatcctgaatggtcattttaccagtgcgttaatgacggtttccatcgcctgcttttccagctcactgcgctgaatgcgtttattggctaatgctgtacgtaatacgcctgcgataacaatatgctttggttcctgccccagatcgcgcatttccagcacaactttaccgacaactctgcacatttctcggtacagttcatcctcttttgtccgatttcccattctttatacctatttatcatgccaactatcagcatatatcaatctaaccaattaaacaaaaatcaaacaaaatcagacaaataacgcgataaattattttaactgtagcaattgagcgatgatatatttatacaccggatgaactttcacttatcctcacactgacaacttcggcaccagacgttgcgcaaacagtgaagtttttgcgtaaccttttccctggaacgttaaatctttgataacaatttattgtctaacaagttgtatattttttgaaacgctgtttttgttttccttttggattaatttcagcgtataatgcgcgccaattgactcttgaatggtttcagcactttggactgtagaactcaacgactcaaaaacaggcactcacgttgggctgagacacaagcacacattcctctgcacgctttttcgatgtcacctatccttagagcgaggcaccaccactttcgtaataccggattcgctttccggcagtgcgcccagaaagcaagtttctcccatccttctcaacttaaagactaagactgtcatgaaaaagaccaaaattgtttgcaccatcggaccgaaaaccgaatctgaagagatgttagctaaaatgctggacgctggcatgaacgttatgcgtctgaacttctctcatggtgactatgcagaacacggtcagcgcattcagaatctgcgcaacgtgatgagcaaaactggtaaaaccgccgctatcctgcttgataccaaaggtccggaaatccgcaccatgaaactggaaggcggtaacgacgtttctctgaaagctggtcagacctttactttcaccactgataaatctgttatcggcaacagcgaaatggttgcggtaacgtatgaaggtttcactactgacctgtctgttggcaacaccgtactggttgacgatggtctgatcggtatggaagttaccgccattgaaggtaacaaagttatctgtaaagtgctgaacaacggtgacctgggcgaaaacaaaggtgtgaacctgcctggcgtttccattgctctgccagcactggctgaaaaagacaaacaggacctgatctttggttgcgaacaaggcgtagactttgttgctgcttcctttattcgtaagcgttctgacgttatcgaaatccgtgagcacctgaaagcgcacggcggcgaaaacatccacatcatctccaaaatcgaaaaccaggaaggcctcaacaacttcgacgaaatcctcgaagcctctgacggcatcatggttgcgcgtggcgacctgggtgtagaaatcccggtagaagaagttatcttcgcccagaagatgatgatcgaaaaatgtatccgtgcacgtaaagtcgttatcactgcgacccagatgctggattccatgatcaaaaacccacgcccgactcgcgcagaagccggtgacgttgcaaacgccatcctcgacggtactgacgcagtgatgctgtctggtgaatccgcaaaaggtaaatacccgctggaagcggtttctatcatggcgaccatctgcgaacgtaccgaccgcgtgatgaacagccgtctcgagttcaacaatgacaaccgtaaactgcgcattaccgaagcggtatgccgtggtgccgttgaaactgctgaaaaactggatgctccgctgatcgtggttgctactcagggcggtaaatctgctcgcgcagtacgtaaatacttcccggatgccaccatcctggcactgaccaccaacgaaaaaacggctcatcagttggtactgagcaaaggcgttgtgccgcagcttgttaaagagatcacttctactgatgatttctaccgtctgggtaaagaactggctctgcagagcggtctggcacacaaaggtgacgttgtagttatggtttctggtgcactggtaccgagcggcactactaacaccgcatctgttcacgtcctgtaatattgcttttgtgaattaatttgtatatcgaagcgccctgatgggcgctttttttatttaatcgataaccagaagcaataaaaaatcaaatcggatttcactatataatctcactttatctaagatgaatccgatggaagcatcctgttttctctcaatttttttatctaaaacccagcgttcgatgcttctttgagcgaacgatcaaaaataagtgccttcccatcaaaaaaatattctcaacataaaaaactttgtgtaatacttgtaacgctacatggagattaactcaatctagagggtattaataatgaaagctactaaactggtactgggcgcggtaatcctgggttctactctgctggcaggttgctccagcaacgctaaaatcgatcagctgtcttctgacgttcagactctgaacgctaaagttgaccagctgagcaacgacgtgaacgcaatgcgttccgacgttcaggctgctaaagatgacgcagctcgtgctaaccagcgtctggacaacatggctactaaataccgcaagtaatagtacctgtgaagtgaaaaatggcgcacattgtgcgccattttttttgtctgccgtttaccgttactgcgtcacgcgtaacatattcccttgctctggttcaccattctgcgcactctctacactaggcgcattgctggctgcgggagttgctccactgctcacgctaaccggataccctgcccgacgatacaacgctttatcgactaacttctgatctacagccttattgtctttaaattgcgtaaagcctgctggcagtgtgtatggcattgtctgaacgttctgctgttcttctgcgcttagtggtcgatgtacttcaacataacgcatcccgttaggctccacggaatatttcaccggttcgttgatcactttcaccggcgttcccgtccgcacgctggagaacaaggctttaatatccggtgcattcatgcgaatacacccactactgacgcgcaaaccgacgctgtccggcgcactggtaccatgaatgaggtattcgccattaccatgcgcgaggcgcagtgcgtaacgtcctagcgggttatttggtccggcaggaacgactggcggtaatttaatgccacgctccaggctacgctgacgaatgcctgccgtaggcgtccaggttgggttagggattttctgcccaacacgcgtttccatcaccggcgtttccagcccctgcaatccaatacctattggataaacctgcacaatattttctcccggcggataataataaaggcgcagctctgcaaggttaacgataatcccctgacgcggtgcatcaggtaataacagttgactaggaatagttatcgtcgtaccaggttttggcaccggggcgatagtgttattggcttcaaggatcaacattgccgcagtatcaaaacgtcgggcaatagcctgaaggtttttatccccttcttgcaccgtatacgtttgattttgcccaaccagtcggcttccggttggtggtagcggataatcaaccgcccaggcagcctggatggcgctaaaagcgccgataagcgtgagtgtaagcaaagacgcgcgtttcattgtaaacctcctgtatttgccggagactcacgctgaaacgtcggatggcgcttatgttcacctgaaaccaaaacactcctgtgcaggtcagtgtaaacattgaccatccggcaatgtgagccaaccggatgaaagctgtccttttagtttagctaagtgcagcggctttggcgcgaattgcgcgaatcatcgcttccagaccttgactacgagatggggtgagatgttgggtgagcgccattttttcaaaccacggacgcacatcgaaattgacaatatcctgcggcgtcatctgatcgtagagaataaagacgaccgcaataagccctttcacaatcgccgcatcgctgtcgccctgtaattcaataattccctgggcattctggcgcatgacaatccacacctgactctgacagccctgaatgctattttgtggacttctgtcttcgtcgcgtaattctggcagacgctggcccagctcaataatgtagagatatttctcttcccagttggcgcagcgtaaaaaattacgcagcaacttttctttatccggcaataaagccatagtgcctccctgttatcccagcaaacggtgaatacgttgcaggccggtcaccagacgatccacttcttcatgggtgttatacatggccaggctcgcccgacacatcgcagggacgttgtaataggccatcaatggcattgcgcagtgatgtccggtacgcacagcaatgccgtaattatcgagaaaactgccaacatcataggcgtggtgtttaccgagattaaaagcaataacgccaagcctgttttgtgggccatagagagtgagatccggtacagattccagctgacttagcgcataatgcatcagattctgttcatactcggctatgttattaagccccagcgcgctaacatactccagcgccgcgccaagaccaatgatgcccccggtattgggtgtaccggcttcaaaccgccatggtgctttggtccaggtagtgccttcactcaggctgacggtggcgatcatagaaccgcccccttcccacggcggcatctcctgcaacaaggcttctttcacataaagaatgccaattccggtggggccatacagtttatgcccggagaacacgtaaaagtcgcaatccagcgcctgaacatccaccggatgatgcatcaccgcctgagcgccatccaccagcacttttgcgccatgctggtgcgcaagcgtgatcatttccgccagtggattttctgtgccaagcacgttggagacatgagtaattgccagcaggcgagttttctcatcaaacagcgtaggcagcgtctccagttgcaacgtaccatcgggattgagcgggatcacacgcagctctgcgccaacgcgtgcgcaaagcatctgccagggaacaatgttagcgtggtgctccatctgactgatgatgatgttatcgcccgcccgcacgttgctgttgccccagctattggcgaccagattgatcccttccgtcgtgccgcggacgaacaccagctcttccgcgctacgggcattaataaacaggcttgcccgcttgcgcacgttctccattttctcggtcgcctgggcgcttaaggtatgaataccacgatgcaccgccgcgtagccatgacgataaaactcggcctcggcgtcaatcacctggctcggtttctgcgcactggcggcgctgtcgagataagccagcggcaaaccgtttacctcacggctaagcaccggaaagtcggcccgcactttgtcgacggaaaaaatcatcttgcacctcctggcagccgttgaccgattcgggccagcacctgctgtttaagcccctcatcacgcagtgcttccgtcagttcggcagcgaaggcgtaaatgatcatctgctgggcatcctgctgattgatcccgcggctgcgcagatagaatatctgttcatcatcaatacgccccaccgtcgcgccgtggctgcatttcacatcatctgcatagatttccagctgcggtttcgtatccacttccgccagtttgcccatcagcagattgttgttggtcatctgaccatccgttttgatggcgtgctgcgcgacgttgatcaaaccgttaaataccgcgcggcctttgtcgctgacgatagttttgtgcaactgtcggctgttacaaaaacctttattgtgttccagccaggtacgggtatcacacacctcgtttttcaccggcatcgccaggctattgatccgcagcgtgctgttttcgccattgagttgcgtactggtgttgtgtcgtaacactgcgccacccagcaggaaactgtggctaaatgcggtggcatcctcagccagcaacaaatcgttatgagcaaagtggtgactgagcgggttttcaaacgccagcttgatatgctgcaagtgggcattcgctgcgacgttgatagtgaaccgtgccccggtaaaatgacgagcatcattcaggctgacaaaatgttcgatcaccgttgcttcggcaccttccgccagatccagatgatgtcggtaatgggcagtgttcacctcttcacctgccacgccctgggtgatatgcattaacagcaatggctttgccggccgttgaccgcgcttcacggcgatatgcgtcacgctttgtgccaggctttccgtcaaatgcagaaacacttccgcctgaatagcgtcgggtaaaccctgacggtcgtcgttaatgctcacttcatatccgctgccttcagttgcatcgctcagtgcgggcacgtaacgcccatcgacaaacaccagccgcacggagtctaacgttaacgctaaggcattacgctgctgtggggatatctctcccgcaatgctgacaaactggctattgatcagcccttccagcggcgtatatttccagttttcatgtttacgtgtcggcagtccggtacgcagcaattgttgtaaatgctgctgtgcttgcggggagcgttttgtcccttcagcttcaaacaagtgatgccactgttgcagcgcgttactgctgttcggtaagccagccataaccctgctcctccagttgtttgaccaacgtgaaatcgccggatttcacaattcgtccctgatatagcacatgaacgtaatcaggcttgatgtagtcgagaatgcgttggtagtgcgtaacaatgatgaaactgcgcttgccatcacgcaggctgttcacgccatcggcgaccacttttaatgcgtcaatatccagcccggagtcgctctcatcaagaatgcataactccggttccagcaccgccatttgcaaaatatcgttgcgctttttctcgccgccggaaaaaccaacgtttacgctacgggttaataaatcttccggcatcttcaggagagcgattttctcttccatcaaatcctgaaaatcaaagcggtcgagcgtttcctggccgcgatagctgcgcaccgcattaagtgccgtttgcaggaaaaactggttactgacacctggaatctccaccggatactggaaggccataaagatgccttcgcccgcgcgatcttccgggctcagcgcaagcaaatctttgcctttgaactcaaccgtgccgcccgtcacttcataatcttctcgcccggcaagcgttgcgcttaaggtacttttgccgctaccgtttggccccataatggcgtgaacttcgccgggatgaacgtcgaggcttaatccgcgcaggatagctttatcttccacgctgacgtgtaaatctttaatacttaacatgtttattccttatccgacgctgtgttcaagactgatggcgaggagtttttgtgcttcaacggcaaattccaacggcagctcgctgaacacgtctttgcagaaaccgttaacaatcatgctgatggcgtcttcttcgctgatcccgcgttgcaggcagtaaaacagttgatcttcaccaatacgacttgtcgttgcctcgtgttccagttgcgcactattgttacgacactcaacatacgggaaggtatgcgccccacaattagcgccaatcagcatactgtcgcactgagtgaaattgcgcgcattggttgccgtcggcatgattttcactaagccgcgataactgttctgactatgtccggcagagatccctttgctgataatggtgcttttggtgtttttaccgatgtggatcatcttggtgccggtatccgcttgctgatgaccgctggtcagcgccacactgtaaaactcaccaatggagttatcgccgcgcaaaatgcagctgggatatttccacgtaatcgcactcccggtttcactttgcgtccaactcattttgctgttttcgccttcgcacaaagcacgcttggtgacgaagttgagaataccgccggtgttgttatcgccaggaaaccagttttgtaccgtggaatatttcacctcggcgtttttatggatgatgacttccaccactgccgcgtgtaactgatagctgtcacgcaccggagcggaacagccttcaatgtagctgacgtagctgtcttcgtcggccaccagaatggtgcgctcaaactgcccggttttttctgcgttaatgcgaaaataggtggaaagttccatcgggcagcgcacgcctttaggcacataaataaacgtaccatcagaggctaccgccgcattaagcgcggcaaagaagttgtcattccccggcaccacggtgccgagatatttacgcaccagttccgggtgatcgtggatcgcctcaccaaaggaacagaaaataattccctgctccgccagtttttcgcgataagtagtggcaacgctaacactgtcgaaaatggcatccaccgccacctctttgccttcccgcacgggaacgcccaactgctcaaacgccgcctccacctctttacttaaaaaggcgttcgcgccagtttgctgcaccgcgccaggttcagacgcgcaagtgtcgtcacaattaccgcagcttggtgcactgtagtagctgtaatcctgataattcagcttgtcgtagtgcgctttcaaccagtgcggttcttccatctccagccatgcgcgataggcgtttagacgaaactccagcatccactccggctcattacgcttcgcgctaattgcgcgcaccacctcttcgtttatcccctttgccagctcatcggtggctaactgggtgaagaatccttctttataattcagcgggccgccggtccaggttttgacatcgtcagttgcttcagtattacgagacatagtaccgcttataccccaaagctttcgccacagccacattcattctgggctttagggttgtgaaatttgaatatctgattaagtccttcacgaacgaaatcgacttccgtgccatcaataaacggcatcgcttgcagcgggacaaacagcttcgcgccgtcgtgttcaaacagcagatcgtctttgtccggctcgctaacactgtcgagcacatagccaaagcccgcgcagcccgtttgcttcacgcctaagcgcacgccgaccatacccggctgctttgccaccagctcacggatgtgtatcgccgctgcgggtgtcagcgttaagccttgccaggcgaaatcttgtgggttaaaggttccactatgcatgtccatcgatttacctcacttcatcgctttcagcgtataacagcatgttagtgataatgattatcagttcaacccagcaaacgcaggggctttaccgtaaaacatgctttttgcctgcttttaataagcatagaccctgatgtgtgggttaacaggcacgctaagaattaggtatctcattgttagataatggttattatctaaggagcattaaggctgtgatgaaaaagaaaaagttgtattgaaaatgactatttaagagataggtaaaaaagtgcagcgttcagaaataagaaaacccttaagtctgtgcgacacaggcttaagggtttctaccccatccggcgcttatctccggcactctcagtggcttagctcttgaaggggcgataagaataatctcataaagctaacccgccgttttaacacaaactgcgattagtattatttttgaacaatatcaggcggtagataagcagtattaagaaggtcatcgaacctggacggaggttaatccaggtcgatttggcgaacttgcggcattaagtcaggatcaatgcacgcccagacgccaggcaaagtagatttcttcttttaattcagcagaagagagagtaagcaggtcagcaaattcaagttctagttgtttcagacgtttgagatattgggcaggactaagattgctctggtcacggcgtaaaaattcaatggccagctgggtgggatcaagttgagtagacatagcatcctcgcttttagacaagacctgcacagtataccaccgtttactgtgcagataatgaccaaaagcaatatgcgtcacacttttctggtgacaacgtcacaaaatggcggtcgtcaatcgactgctacagcacaaacgccctttctcatcgaagatttcaatctgccagacctggtgacggctaccgagatgcaacggtttgcatacgccgcgcacccgcccttctcgtgcgctgcggacgtggttagcattgatttccagaccaaccactttttgctcaccttcggtacataaataaccggcaacggaaccgatactttcggccagtaccacggatgctcctccatgcagcaacccgaaaggctgctttgtccggctgtctactggcattgtcgcttcaagggtgtcatcaccaatatgttcaaagcgaatatccaggaaccccaccatgtttccttcacccatagcattcagtgcttccagggtgattttccgtttccatatcatttaataatctccagtaaagcctgcacaggatggcgtacccccgtgccttcaacccgttttacctggctacggcaggaatatccggtcgccagacagcggttacgcggcagtcgctgcatagcctgatgccaggataactcatagatcccgaggctattttcatggtttttcgcttcatgtccgtaagtccctgccatgccgcagcaacccacgctgacattttccagtttcgcgccaaaacgggcaaatatcgcggcccattgtgctggcgcacccggcaaggcggtaacttcggtacagtgaccaaagaaataccaactttcaccgctgactgtagccactggctgactctcaagtgcgcttgccagccattcattcgccagtaagacgttaaactcgccacgctcctcgcccagcgccagtttatattcatcgcgataacaaagtaccagcgccggatcgacgcccaccattggcatacccagcttcgccatacggttgaggaaatccgccgtctttttcgccgtcttcgcaaaacgattaagaaaacctttaatatgctgggctttgccatttgggctaaatggcagtaacacaggctggaaacctaatttttcgaccagacggacaaaatccgccaccacttgcgcatcgtaatagctggtaaaggggtcctgcaccaccaacactgtgcgcgctttctgctctgcattgagagattcaagctgttccagcgtcatgtttgcgctgcgatgccccaccatttgttgttgtaggctggggacgctcagcagcggcaaatcaaccatgccgatatgtttttcgctgagtttgcgcaccagcggctggttaatgaagaagttaaaggttttcggcgcgcgtgccatcagcggcgcgtagctctcgaccgtagcgacgaggtggtcgcgcagcgggcgtaaataacgggtgtgatagagctgcagaaaacgagagcgaaactccggcacatcaattttgatggggcactgggtgctacacgctttacaggccagacagccgctcatcgcctctttgacttcgtgactgaagtcatattcgcctttattcgcatgccagctattgcgcgtgcgggcaattaacgtccgcaaactgacgccggattcaggcagttcttgttccagtttgagtggatcaacgccgcgatccgccaacaaacgcagccattcacgcaccagcgttgcgcgccctttcggactatgaatccggttctgggtgatcttcatgctcggacacatcggactacgggcatcaaagttgaagcataaaccgttgccgttacactccatcgcaccgcgccactgctggcgtaccgcaatggggatctgccgatcgaatgtaccgcgcttcaccgcgtccactttcatcatcggcgcatcgagaccttctggcgggcaaatcttccctgggttgagtcggttatgcgggtcaaatgccgctttcactttgcgcagttctgcaaaaagttcctcaccgaaaaacgccgggctgtattcagcgcgaaaacctttgccgtgctcgccccacaacaaaccaccgtatttcgcagtcagcgccaccacgtcatcagagatttgcttcatcaaaatctcttgttgaggatcgcacatatccagcgctggacggacgtgcaagacacctgcgtcgacgtgaccgaacataccgtagcttaagccgtggctgtcgagcagcgcgcgaaattcagcaatataatccgccaggtgttccggcggtacgcaggtatcctcagcaaacggaattggcttagcggcacctttggcattgccaagcagaccaacggcttttttgcgcattgcatagatacgttcaacccccgccagctcacggcacacctgccagccgatgacacctgcttgatgactggcgatcagctcatccaaccgcgcacagagtgcatttacccgctcatcaatcagcgcctcatcatcaccagcaaattccacaatgttcagcccgagcatctcttggtcaggcacatcggtaatcaactcgctgacggaatgccagacaatatcttcccgcgccagattcagcactttactgtccaccgtctctacgctaagcgcccgcgcctcaaccataaacggcgcgttacgcagcgcagagtcaaaagagtcatatttgacgttcaccagacggcgcactttaggcaagcgtgtaatatccagccgcgcttcggtaataaaggccagcgtcccttcactacccgtcagaatgcgcgtcaggtcgaactcggtcatctcatcgttaaagacatgacgcagatcgtaaccggtaagaaagcggttaagtttggggaagttgtcgataattaactggcgttgctgacggcaacgttgataaaccgtgttataaattcgcccgattgtggtattggatttacccagcgtttccgccaattcgacgggtaaaggttgcgtatcgagaatatcgccccccaacaacaccgcgcgtacgccaagtacgtgatcactcgttttgccatagaccaggcttccctgaccggatgcatcggtattgatcatcccaccgagcgttgcccggttgctggtgctaagttccggcgcaaaaaagtagccgaacggtttcaggtactgattgagttgatcttttatcaccccggcctcaacgcgcacccagccctcttcagggttaatttcgatgatgcggttcatatggcgggacatatcaacaataatcccctggttgagcgcctgaccgttagtgccggtgccgccgccgcggggggtaaagatcaggctactatagcgttcctgcgcggcaagacgggcgatcagcgccacatctgcggtactacgcggaaataccaccgcatcggggagaagttggtaaatactgttgtcggtgctcattgtcagacgatcggcataacttgtcgccgtatcgccggtaaaaccttgttgctccagctcttgcaaaaaattaagcaccagttgaacgacgccgggtgcctgggaaatctgtggaatcattatattgaccctttcctgcggtctgtgatgtaggtcgatacactattctttcaggctgctgcaatagcgcactgaaaggtgatgtttgtttactctatggatttcgtgttgcaggaaggcggcaagcgagtgaactccaggagcttacaatagtaagtgactggggtgaacgaacgtagccgcagcacatgcaacttgaaatacgacgagtaaatcgtttgcgtgttgcctgagttgttgtaccacatttttttctaacacgcccatcagaattaagggcagaatcggcctgttaaaaaccgctgaaattgctcatcattatgcaggtgagtttcgcgtgttcacgtcgcgtcgacgatttgacgcacaaaaaaggtgaaaagtagttatggtaaatgttcgtcagcccagggatgtcgcacaaattctgcttagcgtgctgtttttagccatcatgattgtggcatgtctgtggattgttcaaccctttattctcggctttgcatgggccggtacggtggttatcgccacctggccggtattgttacgtttgcaaaagatcatgtttggccgccgctctctcgccgttctggtgatgacgctgttattagtgatggtgtttatcatccctattgctttgctggttaacagtatcgtcgacggcagcggcccgctaattaaagccatttccagcggtgacatgacgttacccgatctggcgtggcttaataccattccggtgattggcgcgaagctgtatgcaggctggcacaacttgctggatatgggggggacggcgatcatggcgaaagtccgcccttatattggcaccaccaccacctggttcgttgggcaggcggcgcatatcgggcgctttatggtgcattgtgcgctgatgcttctcttcagtgccctgctgtactggcgcggtgaacaggtggcacaaggcattcgccattttgcaacccgtctggcaggcgttcgcggagatgccgccgtgctgctggcggcacaggctatccgcgcggtggcgctgggtgtggtggtgacggcgttagtacaggcagtgcttggcggtatcggcctcgccgtatccggcgtaccttatgcaacgttgctaacggtgttaatgatcctctcctgccttgtccagcttggcccgttgccggtactgattccggcgattatctggctctactggactggcgataccacctggggaacggtattgttagtgtggagcggtgtggttggcacgctggataacgtcatccgcccaatgttaattcgcatgggtgccgatttaccgctgatcctgattctctctggcgttattggtggtttgattgctttcgggatgatcggtctgtttattggtccggttctgttagccgtttcctggcgtctgtttgccgcgtgggtggaagaagtcccgccgccgacggaccaaccggaagaaattctcgaagaacttggcgaaatcgagaaaccgaataagtaatttctcatcaggcggctctgccgcctgattgttaaccaccgctaattgatatttgcttgctcttccccatattttcctgcttaccgccattcagctggtagtacctgtcgcaaattctttacagtttttaaactaatgagacgaatctgatcgacgcaaaaagtccgtatgcctactattagctcacggttataaatcaacatattgatttataagcatggaaatcccctgagtgaaacaacgaattgctgtgtgtagtctttgcccatctcccacgatgggcttttttttaacatttttccgcttcgctacctcgcccctcactctttccaataatgttgcacaagatactgtgactctcttcaagccgtcagcaggctgataatgttatttatattttattgtttatttcatgcagccattacacgatgaacgcttatgaactccaggcactccgccatatttttgccatgactattgatgaatgcgcgacctggattgcccagaccggtgacagtgaaagctggcgtcagtgggaaaatggcaagtgtgccattcctgatcgtgtagtcgagcaactgttggctatgcgtcagcaaagaaaaaaacatcttcatgccatcatagagaaaataaataaccgcatcggcaacaacaccatgcgttttttccccgacttaaccgcatttcaacgagtctaccctgatggcaattttattgactggaagatctatcaaagcgtagctgctgaattatatgcacacgatctggagcggctttgttaatttttccacagaaaggaattgtcgttgttacaacaataatgaacggatgctgacacaacatcgcttcactttttaaagcacctttgctaagtagaacctatgaaaaatccctatttccctaccgcacttgggttgtattttaattacctggtgcatggtatgggcgtccttttgatgagcctgaatatggccagcctggagacactttggcagactaatgccgcgggtgtcagcatagttatcagtagcctgggcattggtcgattaagtgtcttgctttttgcaggattattatccgatcgctttggtcgccgcccttttatcatgctcgggatgtgctgctatatggccttcttttttggcatcctgcagaccaataacatcattatcgcttatgtttttggctttctggcgggaatggcaaacagttttctcgatgcaggcacttatcccagtttgatggaagcttttccacgcagtcctgggacagccaatattttaattaaagcatttgtttccagcggacaatttttattaccgctaatcattagcctgttagtgtgggctgaactgtggttcggttggtcctttatgattgctgcaggcattatgtttattaacgctctgtttttataccgttgtacgttcccaccccatccgggtcgtcgcttacctgtcataaagaaaaccaccagctctacggaacatcgctgtagtattatcgatttagccagttataccttatatggctatatcagtatggcaacgttttatctggttagccagtggctggcacagtacggacaatttgttgcaggcatgagttacactatgagcatcaaactactcagtatctacaccgtgggtagcctgctttgtgtatttattaccgctccactcattcgtaataccgttcgcccaacaacattactgatgctgtacacctttatcagttttattgctctgtttaccgtctgcctgcatcccacattttatgtggtgataatatttgcttttgtcattggttttacctctgctggaggtgttgtgcaaattggcctgacgttaatggctgaacgtttcccttacgctaaaggtaaagctacagggatctattacagtgcgggcagtattgcgacctttactattccgttgattacggctcatctgtcccaaagaagtattgccgatattatgtggttcgataccgccatcgctgccatcggttttttactggcactgtttatcggcttacgcagccgcaaaaaaacgcggcatcacagcctaaaggaaaatgtcgctccgggtgggtaatgcaatattcttttcaggtcatgcaagatcttacggataaataactctttctgcgctaactaaggaaaatcgcgatcaaaaacaaactatgacatgcaatattcctggaaacataaactttatgccatgtacccagggaaaatcatcttcagtatagtaattatgtaaaccgtcggagaacaatacgtacggtaacgaaattatctttcagcaaggagctgtgaaaatgtctcaaaataaggctttcagcacgccatttatcctggctgttctttgtatttacttcagctacttcctgcacggcattagtgttattacgcttgcccaaaatatgagttctctggcggaaaagttttccactgacaacgcgggcattgcctacttaatttccggtatcggtttggggcgattgatcagtattttattcttcggtgtgatctccgataagtttggtcgtcgggcggtgatattaatggcagtaataatgtatctgctattcttctttggtattcccgcttgcccgaatttaactctcgcctacggtctggcagtgtgcgtaggtatcgctaacagtgcgctggatacgggtggctaccccgcgctcatggaatgctttccgaaagcctctggtagcgcggtcatactggttaaagcgatggtgagttttgggcaaatgttctacccaatgctggtgagctatatgttgctcaataatatctggtacggctatgggctgattattccgggtattctatttgtactgatcacgctgatgctgttgaaaagcaaattccccagccagttggtgggcgccagcgtaactaatgaattaccgcaaatgaacagcaaaccgttagtctggctggaaggtgttagtagcgtactgttcggtgtagccgcattcagcaccttttatgtgattgtggtgtggatgcccaaatatgcgatggcttttgctggtatgagtgaagctgaggcattaaaaaccatctcttattacagtatgggcagcttggtctgtgtctttatttttgccgcactactgaaaaaaatggtccggcccatctgggctaatgtatttaactctgcactggcaacaataacagcagccattatctacctgtacccttctccactggtgtgcaatgccggagcctttgttatcggtttcagtgcagctggcggcattttacagctcggcgttagcgtcatgagtgagttttttcccaaaagcaaagccaaagtcaccagtatttatatgatgatgggtggactggctaactttgttattccactgattaccggttatctgagcaacatcggcctgcaatatatcattgttctcgattttactttcgcgctgctggccctgattaccgcaattattgtttttatccgctattaccgcgttttcattattcctgaaaatgatgtgcggtttggcgagcgtaaattttgcacccggttaaacacaattaagcatagaggttaaaggagttaattatggatgttaccgcaaaatacgaattgattgggttgatggcctatcctatccgccacagtttaagccccgaaatgcagaataaagccttagaaaaagcgggattgccatttacctatatggccttcgaagtggataacgatagctttcctggagcaattgaaggattaaaagccctcaaaatgcgcggaactggtgtaagcatgccgaacaaacaactggcgtgtgaatatgttgatgaattaacaccagctgccaaactggtgggggccatcaacaccatcgttaatgatgatggctatctgcgtggctataacaccgacggcacgggccatattcgcgccattaaagagagcggttttgatatcaaaggcaaaacgatggtgctgttaggggccggtggtgccagtacggcaattggcgcgcagggggcaattgaaggtttaaaagaaattaaactctttaaccgtcgggatgagttcttcgataaagccctcgccttcgcgcagcgggttaatgaaaacaccgattgtgtcgtcacggtcaccgatctcgccgatcagcaagcctttgctgaagccctggcttccgccgacattttaaccaatggcacaaaagtgggtatgaaaccccttgagaatgaaagtttggttaatgatatcagtctgttacatccgggacttctggtcactgaatgcgtgtataacccgcatatgacgaagttattgcagcaggcgcaacaagctggttgcaaaacgattgatggatacggcatgttgttgtggcaaggggctgaacagttcacattatggactggcaaagatttccctctggaatatgttaaacaggtcatggggttcggtgcctgacaggctgaccgcgtgcagaaagggtaaaaaatgaaaaccgtaactgtaaaagatctcgtcattggtacgggcgcacctaaaatcatcgtcagcctgatggcgaaagatatcgccagcgtgaaatccgaagctctcgcctatcgtgaagcggactttgatattctggaatggcgtgtggaccactatgccgacctctccaatgtggagtctgtcatggcggcagcaaaaattctccgtgagaccatgccagaaaaaccgctgctgtttaccttccgcagtgccaaagaaggcggcgagcaggcgatttccaccgaggcttatattgcactcaatcgtgcagccatcgacagcggcctggttgatatgatcgatctggagttatttaccggtgatgatcaggttaaagaaaccgtcgcctacgcccacgcgcatgatgtgaaagtagtcatgtccaaccatgacttccataaaacgccggaagccgaagaaatcattgcccgtctgcgcaaaatgcaatccttcgacgccgatattcctaagattgcgctgatgccgcaaagtaccagcgatgtgctgacgttgcttgccgcgaccctggagatgcaggagcagtatgccgatcgtccaattatcacgatgagcatggcaaaaactggcgtaatttctcgtctggctggtgaagtatttggcagcgcggcaacttttggtgcggtaaaaaaagcgtctgcgccagggcaaatcagcgtaaatgatttgcgcacggtattaactattttacaccaggcataagcaataatatttcggcgggaacaccctccccgccgaactaaaaaatatattcaatcgtatttaataaaaatatttcgtgagtctctgtgcgctaattctccatttggcgtagggaaaatcacatctgaatcaggaattaacaatgaaacctgtaaaaccacctcgtattaatggacgagtgccggtcctgagcgcacaggaagcggtgaattatattcccgacgaagcaacactttgtgtgttaggcgctggcggcggtattctggaagccaccacgttaattactgctcttgctgataaatataaacagactcaaacaccacgtaatttaagcattattagtccaacagggcttggcgatcgcgccgaccgtggtattagtcctctggcgcaagaaggtctggtgaaatgggcattatgtggtcactggggacaaagcccgcgtatttctgaactcgcagaacaaaataaaattattgcttataactacccacaaggtgtacttacacaaaccttacgcgccgccgcagcccaccagcctggtattattagtgatattggcatcgggacatttgtcgatccacgccagcaaggcggcaaactgaatgaagtcactaaagaagacctgattaaactggtcgagtttgataacaaagaatatctctattacaaagcgattgcgccagatattgccttcattcgcgctaccacctgcgacagtgaaggctacgccacttttgaagatgaggtgatgtatctcgacgcattggttattgcccaggcggtgcacaataacggcggtattgtgatgatgcaggtgcagaaaatggttaagaaagccacgctgcatcctaaatctgtccgtattccgggttatctggtggatattgtggtggtcgatccggatcaaacccaactgtatggcggtgcaccggttaaccgctttatttctggtgacttcacccttgatgacagtaccaaacttagcctgcccctaaaccaacgtaaattagttgcgcggcgcgcattattcgaaatgcgtaaaggcgcggtggggaatgtcggcgtcggtattgctgacggcattggcctggtcgcccgagaagaaggttgtgctgatgactttattctgacggtagaaacaggtccgattggcggaattactagtcaggggatcgcctttggcgcgaacgtgaatacccgtgccattctggatatgacgtcccagtttgatttttatcacggtggcggtctggatgtttgttatttgagttttgctgaagtcgaccagcacggtaacgtcggcgtgcataaattcaatggtaaaatcatgggcaccggtggatttattgatatcagtgccactagcaagaaaatcattttctgcggcacattaactgcgggcagtttaaaaacagaaattaccgacggcaaattaaatatcgtccaggaaggacgggtgaagaaatttattcgggaactaccggaaattactttcagcggaaaaatcgctctcgagcgagggctggatgttcgttatatcactgagcgcgcagtattcacgctgaaagaagacggcctgcatttaatcgaaatcgcccctggcgtcgatttacaaaaagatattctcgacaaaatggatttcaccccagtgattagcccagaactcaaactgatggacgaaagattatttatcgatgcggcgatgggctttgtcctgcctgaagcggctcattaacaggagtataatgatggatttttctttaactgaagaacaagaactgctgctggccagtattcgcgaactgattacgactaactttccggaagagtatttccgcacctgcgatcaaaacgggacatatccgcgtgagtttatgcgggcgctggcggataacggtatttccatgcttggcgtgccggaagaatttggtggtatccctgcggattacgtcacccaaatgctggcgctgatggaagtgagtaaatgcggtgctccggcatttttaattaccaacggtcaatgtattcacagtatgcgccgtttcggttctgcagagcagctacgtaaaacggcagagagcaccctggaaacgggtgatcccgcctatgccctggcgttgacggaaccaggtgctggcagtgataacaacagtgccactaccacttacacgcgtaaaaacggcaaggtctacatcaacggacaaaaaacctttattaccggtgcgaaagagtacccgtatatgctggtgctggcgcgcgatccgcaaccgaaagatcccaaaaaagccttcaccctgtggtgggtcgactccagtaagcccggcattaagattaacccgctgcataaaatcggctggcatatgctcagcacctgcgaagtctatctcgacaacgtggaggttgaagagagcgacatggtgggcgaagaaggaatgggtttcctcaatgtgatgtacaactttgagatggagcgcctgatcaacgccgcgcgcagcaccggctttgccgaatgcgcctttgaagatgccgcccgctatgccaaccaacgtatcgcttttggtaagcccattggtcataaccagatgatccaggaaaaactggcgctgatggcgattaagatcgacaacatgcgcaacatggtgctgaaagtggcatggcaagccgatcagcatcagagtctgcgcaccagcgcggcgctggcaaaactgtactgtgcacgtaccgcaatggaagtcattgatgatgcgattcaaatcatgggcggtctgggctataccgatgaggcgcgcgtctcccgcttctggcgtgatgtccgttgtgaacgtatcggcggcggtacagacgaaattatgatttacgtagcaggtcggcagatcctgaaagactatcagaacaaataatctgcaggcggcgcagcttcttaacaaactgcgccgccagatttatccaacaagacttaccggttgaggaaattcagataggatttcttgttccgcaaaacagtttttaaattgtctacggtaatcgctggggctacaaccgacatggcgcaaaaacagtttggcaaagtgatcgacattttcataacccacacgccaggagatctctgcctgacttaattcagtattagtgagactccattttgcttccgtcatacgccgttgaataacatagttaataggggaaatacgatactctttggtaaattcatggcaaatataactgacgctggcacgaaattttttgcttaactgttctaaagtgattttttcgcgataattattattcagatagaaaagaatatcttttatcagaacatcttttttaatatacccctgctcgctacgataagcatttttaaaattttcgtagtaaagaatggctaacgtataggcaaatgcatcccataagctagatgtttggctatttttactttgcggcaaaatcacacttagctcattaaataaggtttttatgacttcttttccctgccccgcggcaattaccggacaagaatgcggttgcagtagctgattttcctcagccccctgaaactgaaagccgtacagcgcacaggtacacgtcgttgccggatcgttaacgtcagaggccaccgcatgcagcctgccgcgttctatcaccacaatgtcatccgcatgtgcgacatataagctagaatcgatggtaaaccttgcaacccctttcttgacgtaaatcaactcggtttcattgtcatgaacgtgatgtccggactcccattttggatcatcgctaaatgcaaaacgactaagccgtggcgttttaccggcgacaaacagcgtttcactggcgttatcaaaacagcgttgatacatgacaacctccctattccatgagcaagcaaaaacaatatatgccggataaaatacggcgtgtattgcggttatacaaccgcgtttagcgagagctaaacaagattatttacactgaatgcaagattgtacggtcatggaataactatattgccgcaaattgcacttttgttttagcgatcgcattttttttgcaagattgttggcaaggaaaacagcttgctccgtcgaaaaccccgcaccgctatcgcacactattttcaggccatttttaccttccatcggagatggttccgtatgcgactcacaggagaaatcatgaaaataataacctgctttaagctggtgcctgaagaacaggacattgttgtcactccagaatacaccctgaatttcgacaatgccgacgccaaaatcagccagttcgatctcaatgccattgaagctgcaagccagctcgcaacagatgacgatgagatagccgcgctgaccgttggcggcagtttgttgcagaacagcaaagtgcgcaaagacgtgctatcccgcgggccgcacagcctgtatttggtgcaggatgcgcaacttgaacatgcactgcctctcgataccgcaaaagcgctggcggcagcaattgaaaagatcggcttcgatttactgatctttggtgaaggttccggcgacctttatgcccagcaggttggcttgctggtcggagaaattctgcaacttccggtgattaatgcagtgagtgctattcagcgtcagggcaatacactggtgattgaacgcacgcttgaagatgatgttgaagttattgaactctctgttccagccgtgctctgcgtcacctccgatattaacgtgccacgcattcctagcatgaaagccattctcggcgcgggtaaaaaaccggtaaatcagtggcaggcaagtgatattgactggagccagagcgcgccacttgctgaactggtcggcattcgcgtaccgccgcaaacagaacgtaagcacatcattatcgataacgatagcccggaggccattgccgagctggcggaacatctgaagaaagccctgaactgaagcctacggagaagaaacgatgagtcaattaaacagcgtctgggtctttagcgataatcctgaacgttatgctgaactgtttggcggcgctcagcaatggggccaacaggtgtatgccattgtacaaaataccgaccaggcgcaggcagttatgccttatggtccaaaatgtctttatgttcttgcgcaaaacgacgcgctgcaacgcactgaaaattacgccgaaagcattgctgccctgctgaaagataaacaccccgctatgttgctgttggccgcgacgaaacgtggtaaagcgctggcagcacggttaagtgtgcaactgaatgcggcgctggtgaacgatgccacggcggtggatattgtcgatggtcacatttgcgccgaacaccggatgtatggcgggttagcgttcgctcaggaaaagatcaacagcccgctggcgatcattacccttgcacccggtgttcaggaaccgtgcaccagtgatacctctcatcagtgcccgacagaaacggtaccttatgttgctccgcgtcatgaaattctctgtcgcgaacgccgtgcgaaagccgcaagcagcgtggacctgagcaaagcaaaacgtgtggttggcgtcggtcgtggactggcggcgcaggatgacctaaaaatggtccacgaactggcggcggtgctgaatgctgaagtcggctgtagtcgtccaattgccgaaggcgagaactggatggagcgtgaacgttatatcggtgtctccggcgtgttgctgaaatccgatctctacctgacgctggggatctccgggcagatccagcatatggttggcggcaacggcgcaaaagtgattgtcgccatcaataaagataaaaatgcgccaatcttcaactatgccgactacggtctggtgggcgatatctacaaagtcgtccctgccctgattagccagttgagccgctaattcccctttcaaccacatctcccgctgtaaacgcagcgggaagggagcataacgcatgagcgatgacaaatttgatgccattgtggtcggtgcgggcgttgctggtagcgttgccgcactggtcatggcacgagccgggctggatgtcctggtgatagaacgcggcgacagtgccggatgtaaaaacatgaccggcgggcgtctttatgcccacacacttgaagcaatcattccaggctttgcagtaagtgcgccggtagaacgcaaggtcacacgcgagaaaatctccttcttaaccgaagaaagcgccgttaccctcgattttcaccgcgagcagccagatgttccgcaacacgcatcttataccgtattgcgtaatcgtctggacccgtggttgatggaacaagccgagcaggcgggcgcgcagtttatcccaggcgttcgcgtcgacgcgctggttcgtgaaggaaacaaggtcactggcgtgcaggctggggatgatattctcgaagcgaatgtggtgattctggctgatggcgttaacagcatgcttggccgcagcctgggaatggttcccgcttccgatccgcatcattacgctgttggtgttaaagaggttattggcctcacaccagaacagatcaacgatcgctttaatattacgggcgaggaaggtgccgcctggctgtttgccggttccccttctgacggcctgatgggcgggggatttctctataccaacaaggattccatatccttggggctggtttgtggattgggtgatatcgcccatgcgcaaaaaagcgtgccgcaaatgctggaagattttaaacaacaccccgccattcgcccgctgattagcggcggcaaactgcttgaatattccgcgcatatggtgccggaaggcggtctggcaatggtgccgcaactggttaacgagggcgtgatgatcgttggtgacgccgcaggcttctgcctgaatttgggttttacggtccgcggcatggatttagccatcgcaagcgctcaggctgccgccacaacggtgatcgccgccaaagaacgcgcggatttctccgccagcagtctggcgcaatacaaacgtgagctggaacaaagctgcgtcatgcgtgatatgcagcattttcgcaagatcccggcgctgatggaaaacccgcgcctgtttagccaatacccacgaatggtagccgacatcatgaacgagatgttcaccatcgacggcaaaccaaaccagccggtacgaaaaatgatcatgggacatgcgaagaaaattgggctgatcaacttgctgaaagatggcattaagggagcaaccgcgctatgagccagaacgctacggttaacgtcgacatcaaattaggcgtcaataaattccatgttgatgagggccacccgcatatcattctggcggaaaatcccgatatcaatgaattccataaattaatgaaagcctgccctgccggactttataagcaggatgacgcaggaaacattcattttgattccgccggttgtctggagtgcggcacctgtcgggtgctgtgcggtaacactattctcgaacagtggcaatatcccgcaggcaccttcggtattgattttcgctacggctaatcatgcatcccacaggcccgcatctcgggcctgatgttctgtttcgagagtccaacatgaaagtgacattaacgtttaacgaacaacgtcgtgcggcgtatcgtcagcaagggttatggggcgatgctagcctggccgattactggcagcagaccgctcgtgcgatgccagacaaaattgccgtggtcgataatcatggtgcaagctacacctatagcgcgctcgatcacgccgcgagctgtctggcaaactggatgttagcgaagggtattgaaagtggcgatcgcatcgcatttcaactgcctggctggtgtgaatttaccgttatctatcttgcctgcctgaaaatcggtgcagtttccgtgccgctgttgccttcctggcgggaagcagaactggtgtgggtgctcaataagtgtcaggcaaaaatgttctttgcaccgacgttgtttaaacaaacgcgtccggtagatttaatcctgccgctgcaaaatcagcttccacaactacaacaaattgtcggcgtggacaaactggctcccgccacctcttccctcagtttaagtcagattatcgccgacaataccagtctgaccacggcgataacgacccacggcgatgaattagctgcggtgctgtttacctccggaaccgagggtctgccaaagggcgtgatgctaacgcataacaatattctcgccagtgagcgggcttattgcgcgcgactgaatctgacctggcaggatgtctttatgatgcctgcgccacttggtcacgcaacgggctttctgcatggcgtaacggcaccattcttaattggcgctcgcagcgtgttgttagatattttcactcctgatgcgtgtctcgcgctgcttgagcagcagcgttgcacctgtatgctcggcgcaacgccgtttgtctatgatcttttgaatgtactagagaaacaacccgcggaccttagtgcgctgcgtttctttctttgcggcggaaccacaatccccaaaaaagtggcgcgtgaatgccagcagcgcggcattaaattattaagtgtttatggttccacagaaagtagcccgcatgcggtggtgaatctcgatgatcctttgagccgctttatgcacaccgatggttacgctgccgcaggtgtagagattaaagtggtcgatgacgcacgcaagaccttaccgccaggttgcgaaggtgaagaagccagccgtggcccaatgtgtttatggggtattttgatgaacctgaattaaccgcccgtgccctggatgaagaaggctggtattacagcggcgatctctgccgtatggatgaggctggctatataaaaattaccggacgcaaaaaagatattattgtccgcggcggcgaaaatattagcagccgtgaagtggaagatattttattgcagcatcctaaaattcacgatgcctgtgtggttgcaatgtccgatgaacgtttaggtgaacgaagttgcgcttatgtcgtgctgaaagcgccgcatcatagtttaagcctggaagaggtagtggctttttttagccgtaaacgggtcgcaaaatataaatatcctgaacatatcgtggtaatcgaaaaactaccgcgaactaccagtggtaaaatacaaaagtttttgttaagaaaagatattatgcggcgtttaacgcaggatgtctgtgaagagattgaataagtttcatcttcggggatcacataaccccggcgactaaacgccgccggggatttattttatttcttcagttcagccaggcttaaccaggtttgcaccacggtgtccgggttcagagacaggctatcgatcccctcttccatcaaccatgcggcaaagtcttcgtggtcggacggaccctgaccgcaaatcccgacatatttgccctgtttcttcgcggcacggatagccatgctcagcagtgctttcaccgcatcgttgcgctcatcgaacaattcagacaccacgccggagtcacggtccagaccgagcgccagctgcgtcatatcgttactgccaatactgaagccgtcgaaatattcgaggaactgctcggccagcaaggcgttggacgggatttcacacatcatgatgattttcagcccgttctcgccacgtttcagcccctgacgcgccagttcttcaaccaccgctttcgcctgatctacggtacgcacgaacgggatcatgatctcaacgttggtcagtcccatgtcgttgcgcacacgtttcactgcttcacactccagcgcgaaacagtcgcggaagctgtcggaaacatagcggcccgcgccacggaagccgagcatcgggttctcttcatctggctcgtaacgctcaccaccgaccaggttggcatattcgttgcttttaaaatcagagagacggacaatgacgcgcttcggataaaacgcggcacccagcgtcgcgatcccttcagtcagacgaccaacgtaaaattcacgcggagaatcaaaacctttcatcatctcgcggatttcgttttgcaactgcggttcctgatcgtcaaactcaagcagtgcgcgtgggtggacgccaatcatacggttgatgataaattccagacgcgcaaggcccacgccttcgttcggtaggcaggcgaagtcgaaagcacggtccgggttaccgacgttcatcatcactttcaacggcagatccggcatcgtttctacgctggagcttttcacgctaaattccagcaactccgcatagacgtaaccggtatcaccttcggcacaagaaacagtgacgttctcaccgtctttcatccgttctgttgcatctccacagcccactaccgccggaatgcccagttcacgagcgatgatcgccgcgtgacaggtacgaccgccacggttggtgacgatggcagatgctttcttcatgatcggttcccagtccgggtcggtcatgtcagtaaccagcacgtcgccaggttcgatgcggttcatttcgctgatgtcatggatgactttcaccggacccgcaccgatgcgatgaccgatagcacggccttcggcgataatcttaccctgactatgcagcgtataacgctccatgacctgaccgcgactgcgcacggtttccggacgcgcctgcacaatgaacagtttaccggtgtggccatctttcgcccactcaatatccatcgggcgaccgtagtgtttctcaatttgtacggcctgttttgccagttcctgcacttcttcgttggtcaggctgaagatgtcacgctgttcctgcggtacgtcttcgattttaacctgcttgccgtgctcctgggtcggcgcgtaaaccatgcggatttttttgctccccatggtgcggcgcacgatagccgggcgattcgccgccagtgtcggtttatgcacgtaaaactcatccgggttaaccgcaccctgcacgaccatctcaccaaggccccatgcggaagtgataaacaccacctggtcaaagccggattcggtatcaatggagaacatcacgccagaacttgcgaggtcagagcgcaccatccgttgaacaccggcggagagcgccacaccacggtgatcgtaaccctggtgcacacgataagagatggcgcgatcgttaaacagagaagcaaatacatgtttcactgccacgagaacggcgtcaaaaccctgaacgttgaggaaggtttcctgctgaccggcaaaagaagcgtccggcatatcttctgcggtggcggaggagcgcaccgcaaaagaggcgttttcgtcatcggcggaaagctgtgcataggcttcgcggatggcgttttccagctcaggctggaagggagtgtcgataatccactggcggatttgcgcgcccgctttcgcaagctgagtaacatcgtcaatatccgttttatccagcagttcataaatgcgctggtttacgccgctttggtccagaaactggttaaacgcgtcggcggttgtggcgaaaccattcggaacggaaacacccattccggaaagattagtaatcatttcacccagggaggcatttttgcccccaaccctgtctacatcattcatgccgagttggttataccaaagcaccagcggactgctgccattgttggacatcgaacaatccttttgtgataaatgaacggtttgagaaacacatttctgcgcatttatctttgcatatttaaccggatgaaaaaaacggtgaatcgttcaagcaaatatatttttttactttttaagactgatcccagcgttgcgcaaatctgctctcttcgacaatttccacataaaccatcggtataaacgaaaccataaaaatgaaatgctgttttcataaaaaataaaattgaaggttcattttataaaccagacataacgttctacgcttctgtgcgtttttaatttatgctttcatagaattatgtctgcatcacgggaagaacaaaatggataatgctgttgatcgccacgttttttatatttctgatggtacggcaataactgcggaggtattaggacacgcagtaatgagtcaatttcccgtcactatcagcagcatcacgctgccgtttgtcgaaaatgagagccgtgcacgggcagtgaaggatcagattgacgcaatttatcaccagacaggcgtgcgcccgctggtcttctactccatcgtgttgccggagattcgcgccatcatcttgcaaagtgaaggcttttgccaggatatcgttcaggcgctggttgccccgctacaacaagagatgaaactggatccaacgccgattgctcatcgtacccatggccttaaccctaataatctcaataaatatgatgcgcgcattgcggcgattgattacaccctcgcccacgatgacggcattagcttgcgcaatctggaccaggctcaggtgatcctgctcggtgtttctcgctgtggtaaaacccccaccagtctgtatctggcaatgcagtttggtatccgcgcggcaaactacccctttattgccgacgatatggataatctggtgctacccgcgagcctcaaaccgcttcagcataaattgttcggcctgactatcgacccggaacgtctggcggcgattcgcgaggaacgtcgggagaacagtcgctatgccagccttcgtcagtgcaggatggaagtcgcggaagtggaagccttgtaccgtaaaaatcagatcccgtggattaacagtaccaattatagcgtagaagagattgccaccaagatcctcgatatcatgggccttagtcgccgaatgtactaaagaactagtgcattagcttatttttttgttatcatgctaaccacccggcgaggtgtgacacacctcgcacttgaaatcagcagcgattggtttatcgtgatgcgcatcacttcccggcagtcctgccgtagaagcaacaaatttctgagacttgtaatgaacagaactgacgaactccgtactgcgcgtattgagagcctggtaacgcccgccgaactcgcgctacggtatcccgtaacgcctggcgtcgccacccatgtcaccgactcccgccgcagaattgaaaaaatactgaatggtgaagataagcgactgttggtcattattggcccctgcagcatccacgatctcaccgctgcaatggagtacgccacccgtctgcagagcctgcgcaaccagtaccagagtcggctggaaatcgtaatgcgcacctattttgaaaaaccacgaactgttgtcggctggaaaggactaatctccgatccagatttaaacggcagctatcgggtaaatcacggtctggagctggcgcgcaaattacttttacaggtaaatgagctgggcgtcccaaccgcgaccgagttcctcgatatggtgaccggtcagtttattgctgatttaatcagttggggcgcgattggcgcacgtactaccgaaagtcagatccaccgcgaaatggctagcgcactctcctgtccggtaggtttttaaaatggtaccgatggcaatacgcggattgctgtggatgctatccgcgcagcccgcgccagccatatgttcctcagcccagacaaaaatggtcagatgaccatctatcagaccagcggcaacccgtatggccacattattatgcgtggcggcaaaaaaccgaattatcatgccgatgatatcgccgcagcctgcgatacgctgcacgagtttgatttacctgaacatctggtggtggatttcagccacggtaactgccagaagcagcaccgtcgccagttagaagtttgtgaggatatttgtcagcaaatccgcaatggctctacggcgattgctggaattatggcggaaagtttcctgcgcgaaggaacgcaaaaaatcgtcggcagtcagccgctcacttacggtcaatccattaccgacccgtgtctgggctgggaggataccgaacgcctggtcgaaaaactcgcctctgcggtagatacccgcttctgaatgcgtgcccattcctgacggaatgggcatttctgcgcaacttgttgtcttctcaacaaattactgcttgctctggtcagccataatattgataataagaatcattgttatatcaattattattaatttttatgcgttatacggatagcagaaaactcacgcctgaaacggatgccaatcacaagaccgcttccccgcagcctattcggcgaatttccagccagacactgttaggtccggatggcaaactgattatcgatcatgacgggcaagaatatctgctccgtaaaactcaggctggcaagctgctgttgaccaagtaacctttaactgctgcagctgacttccagccgtttaccccagtcaggtggacgactgacatagtcatcatctctgtcgctgaaaggatttcgcaacgcctcatgcaggcggtgcaattccgtcatatcacccttttctgccgcttcaatcgcccgttgcgccaaccagttgcgcaataccagagcggggttaacgctttgcatcagttgctgacgctcactatcgctaacctcgtcttgttgcaaacgcccccgataacgggcaaaccagtcatcaaatgccgcacgatcaataaactcatcacgtagcggactcgccgcgctgtgctgctcggtcagactcagcatgcggaatgtgcgggtataatcgctgcgctctcgcgccatcagactgaataattcattcagtagcgcgttatcctctttttgctccgtcatgaagcccagtttctgccgcatccgttctccataatgcgtcaacaaaacctgctgatagctgtccagggcctcattcagggcatctacggcaacaaatgggctcaatgtctgcgccagacgctgtaaattccacaacgcgacggcaggttgattatcaaagctgtaacgcccttgatgatcgctgtgattacaaataaaaccgggttcgtaatcatcaagaaaaccaaacggcccgtaatcaagcgtcagccccagcaggctcatgttgtcggtattcatcaccccatgagcaaagccgaccgtctgccattgggcaattaagctcgcggtacgtgcgacaacatcgctaaaccagagacggtatttgtcctcatcatctgcaagatgactccagtaatgacgaatagcaaagtcagctaactgacgaaccttttcgctctcgcggcggtagtaaaaatgttcgaaatgaccaaagcgcagatgacttggtgccacacgcatcagcatcgcgcctggctccgccgtttcccgatacactgggctatcgctggtgacgatacttaacgcgcgggtcgtcggaatgcccagataatgcatcgcctcactggcgagactttctcgtatcgtgctacgtaaaaccgcccgtccatcacccattcggctataaggcgtcaggccagcacctttcagatgccagtccattgtagtgccatcagcaagcagttgttcgccgagtaaaatgccgcgcccatcacccagttggcccgcccagacgccgaactgatgaccactgtaaacctgcgccagtggactcataccaggcagtagggcttcgccgccccagacacctgcgccatttttaaacaggctgcttggaatactcagcgtgttagccagttcggtattatgccaaatcagccgggcattatttaaaggcgtaggggaaagtgctgtataggtttctggcaattcatcgcgccagcgggtaacaaaagacagggtcatagatcctcctgtttgatagtgtagacggttactctcgtcttaaacaccagcaaacagaagggttatcgctgaaccaacgtcgttatctgatttatgggaacggcaggccacaggcatccctggagagcatggaaatcgaagggggtaatctgtgccaatatttctgccgtatcaatgcctcccgcaatgatgcaattgcaacaaggggaaatttgcgcctggatcgcacgaataaacggttcgaaggagcggtgcgtgatttgttgctgaataaaacttttatccagcatgacgcgggtgaaaagaccatcaaaaaccgctttcattgtgctattgcctgctcccaaattacctaacacaaggggatacacttggcttaaggataaaagaccgcgattatcttttccttcattgagatgcgggtaattctcattaatcaacagttcaataaacggatattttaatagttcgcctgcgtaattatccctctctaataataatgtagccacttgtggcgttaaattaagccaggcaaagagtttatgttgaataaaaaaatgttggcaactttttagtaattccaactgctcactaaataattgccaatgttgctcctcggtaagttgcgctataacccgactcgtcgggatacgaaccgtaccatcttcactggagaaatgggtaattaactcaacgccgacaaggacttgctggttgtctcttatcggcaggaaatagcaatcagaatgataaagattctccaaaaaaatcttcatggtaaccgtccctctcgaaggatgtttttcagtatccggctaaaagggatgaggccataagacataacaattacagaaggagtaactttcatttgttccatgttaaccactttttcaggggtcctttttttagattatcctgattataaacgaataatccatttacggaatttttgtctgcaaaatactactgtattcaggagtaaatggacggcgatgtatcatcgccgtccatttttcgacatattagattcgtctcgcctgccagaaatttttctgccaatagacattatcaagactggaacgcatcactcccttgctggtagaggcgtggataaattggttgttggtatcgtaaatacctacatgcaaaccattttgtccggaccccgttttgaaaaagaccaggtcacctggcagcaactcgtctttatcaatttgcgtgccaatagaggcttgttgtttggtttcacggggcagctgcaaatcgaaacgatcgcgcatcgtcacaaccacaaatccgctacagtccacaccgcgccgcgtcatgccaccataacgatacggcgtgccatgccagctttgtagctggtcgttcaaaccggcaataacggtaatgctatcagaaagtctggcatttggcggcggtgctttatggtggctacacccggccagaagcagtgctgtgatcaaaataaggcagaaacgcattccgtacggttcctctgttttttattcttgcattaatttagcgtcgtaattacccgattttcaagatactaatgaaatcagatggtgctaatcagcattctgtgaccttcgatatccagacggcgaaaattcatcccataggcctgcgccagatttggcggcgtgagcacctcttccctgcgtccactggccagcatttttccaccttttagcaaccacgcccgatgcgcatgacgcaatgtgtggttgagatcgtgactgctcatcacaatcgccagtccttgctgacacagcgcgctcagaattttgtctaacgcactttgttgcgcaacatcaagactgttcatcggctcatcaagaagcagcaattggcctgcgggattggcttgtggtgtgatttgcaacaccaccgcagcaagacgtacgcgttgccattcaccgccggaaagttgattggtgctacgtccgagtttgtcatcaagagccagcgcccctgcgacatcattcagtagttcggtacgcgttttatcgtgctgatgcagtgtcaggtagtgccagaccggcgttgcaaacggcggcgtctgctgttgactaagataggcgcgatgcagcgcgagttttgttgcggaccatgcttccagtggttgccccgcgaactgaatgcttcccttaccgctggtcattccggccattcgcgccagtaaggtactcttacccgcgccattcggccccaccaggtgcaggatctccccagcccgaacctcgccagaaagcggccccaggcgggtagattccgcaacatcttgtaactgcatcacaatagacattattttgccaacgccagtttaatgctttccatcacaatgggatcttccggcgtcatatccggggaaaaacgctggatgacttttccgtccctgccaaccaggaatttttcaaaattccataaaatatcatccgggtacagcggtgcacggcctttgctgaccatacgggcatagaatccgctctcttccggcgcgactgcggtcggcgctgcggcaatcaatttttgatacagcggatggcgtccttcgccattaacttcaatcttactgaacatcgggaacgtcaccccccatgtggtggtacagtaagttttaatctcttcatcgctgcccggttcttgttccagaaactggttgcacgggaatcccagcaccataaaacctcgatcgacccaggctttctgaatattctccaactgctcatattgcggcgttaagccacacttactggcgacattgacaatcaacagcacattaccggcgaacttctccagcgtggtcacttcaccgtcgatatctttcactacggtcgtcagaatggaatcttgcatcgtttctcctgggtgtggtcagtaaaaatcttagcttttaatcatagaccgtctttttgcggttaacgtcctgcttttaacaataaccagataaacaccggcgcacctaacgttgcggtgaccacgccaataggcagctctgcggcagctaatgccaggcgcgctacaatatcggccagcagcaatgcgctcgcccctgccagcgcgcagccgggaagtaatacgcgatgatcggttaaaccacacaaccggagaatatgggggatcaccagaccaataaagccgatagcacccgccagcgccacactgacgccaaccatccagccggtcgctgccaccagcacattgcgccagaaccacaggggtaaacccagttgccgcgcgctgatctcgccaagtgctaacatattcatcggcctggactgacaacagatccacaacaacacggggatcaatgccagcatcagccagctttgccgccagtctacgccgccaaaaccgcccatcatccagtacatcagctgacgcaaatcaacactggtggaaaagtagatagcccacgtcattagtgcgctacagataatccctaatgcaacgccagccagcaataaccgactggtgctaagatgacgacgggcgaaacgtaagagtattaaagtgatgataagcgcgccagcaatcgcacacagccctagcgcccagttggggagttgcccttgcccaagcaataccgcggcgataagccccacgcctgcgccgttagagacgccaagtagtccaggttctgccagaggattttcaaacaacgcctgcattacagcgccggatatagccagcgccgcaccaaccagcaatacagccagcgtacgtggcaggcgaatttgccagacgaacagttcgccacgaggagtaaaccagtcacctgggctgatccattgttcaccggcgcaaaggcttaagagaagcgccagcagcatcaaaacactcaggcataataaccagcgaatattttgtcgctgttgttggcgggcaagtgtcagcatggtatccgttctgctgaagtgtcatggcgttgattttacggtgactcttcgacagtgaaaagaaaaaaggccgcagagcggcctttttagttagatcagattactcgtctttggggctagcgttttcgacccggctttttaacttctgcccgggtctgaaggtcaccacgcgccgtgctgtaatgggaatatcctcgcccgttttcgggttacgtcccgggcgttgattcttatcacgcagatcgaagttaccaaaaccagagagtttcacctgttcgccgttttccagagcgcgacggatctcttcgaaaaacagttcaaccagttctttggcatcccgcttgctaagcccaagcttatcaaacagatattcactcatttcagcttttgtaagcgccataggttcaatccctcaaacttgcctggaatcgctcttttaatgcctctacacatttggcgacggtagcggcaatctcctcttcttcgagtgtacggctggtatcttgcaggatcaggcttatggcgaggctcttatacccctccgcaacacccttaccgcggtacacgtcaaataagtttacgccaactacctgatttacgccaactttcttacattcggataaaatatccgctgcgggaacgttttctgcgaccaccaccgcgatgtcacgacggttcgccgggaagcgagaaatctcgcgcgcctgaggcaccacgcggtctgcgagcttgttccactccagttcgaacaccagagtgcgaccgttaagatccagtttacgttccagttcaggatgaacaaccccaacaaaaccaatacgttcacctttcagataaatcgctgcggattgccccggatgcagtgccggattcgcttctgcacggaactcaacctcattcagtttaccggtcaggtcgagaacggattcaagatcgcctttcaaatcatagaaatcaacggtctcttttgccaggttccagtgctcttcgtaacggttaccgcaaatcacaccggctaacatcagatcctgacgaatgcccaacggtgcctgagtatctggtacgaaacgcagaccgctttcgaaaatgcgcacacggttctgctgacggttctggttgtacaccacggttgccagcaggccagtccacagagaaagacgcattgcactcatttcaacagagatcgggcttggcagcagtaaggcttcaacgcctggatggatcatctgctgcactttcggatcaacgaagctgtaggtgatcacttcctgatagcctttgtcgttgagcagcgttttcacgcgcttgaggctcaggtcagcttcacggtgagtacccataatcaggcttgcctgtaccggctcatccgggatgttgttgtagccgtaaacacgcgcgacttcttcaaccagatcttcttcaatctccatatcgaaacgccagctcggcgcaactgcctgccattcgtctttgccttcggtcacttcgcagccgagacgacgcagaatgtcagttacctgctcatccgcaatatgatggccgatcaggcgatccagtttgctacgacgtagagtgatggttgcacgcttcggcagcgttgcttcgttggtgatatcaattaccgggccagcctcaccaccgcagatgtcgatcagcagacgggtcgcacgttccatcgctttgtgctgcagtgccggatcaacgccacgctcataacggtgagacgcatcggtatgcaggccatgacgacgagcacgaccggtgatagacagcgggctaaagaacgcgcattccagcagcacgttttgtgtttcgtcattcacgccagagtgttcgccaccgaagatgccgcccatcgccagcgccttgttgtggtcggcgatgaccagagtgtcagcattcagcttcgcttcagtaccgtcgagcagcaccagcgtttcgccctctttcgccatccgcaccacaatgccgccttcaatgcgatctttatcgaaagcgtgcatcggctggcccagttcgagcagcacatagttggtgacgtcaacaactgcatcgatagaacggatcccgcaacgacgcagtttttctttcatccacagcggagttggcgctttaacgttaatgccttttaccacacggccaagataacgcgggcaggcttccggcgcttcgactgtaatcggcagcgtgtcgtcgatggtcgcaccaaccggaacgatttccggttgaaccagcggcagctggttcagcacggcaacgtcacgcgcaacaccaatgatgcctaagcagtcggcacggtttggcgtcacgctgatttcgatggtgttgtcatcaagtttcaggtattcacggatatcggtgccaatcggcgcatccgcaggcagttcgataatgccgctgtgatcgtcagaaatgcccagttcagagaaggagcacagcatcccttcagacggttcgccacgcagtttcgccgctttaattttgaaatcacccggcagaacagcaccaatggtcgctaccgctacacgcaggccctgacggcagtttggcgcaccgcagacgatgtccagcaggcgatcgccgccgacattcacttttgtcacacgcagtttgtcagcgttcggatgctgcgcacactcaaccacttcaccaacgaccacgccgtggaagctgccggcaaccggttctacaccgtcaacttccaggcccgccatagtgatttgatttgccagcgcatcgctatcaatcgccgggttcacccattcgcgtaaccacagttcactgaatttcataatctattcctgccttatttaaactgtttgaggaaacgcagatcgttttcgaagaaactacgcaggtcggtgacgccgtaacgcaacatagtcagacgctccatccccatcccgaaggcgaaaccagagtaaacttccgggtcgatgccaacgttacgcaacacgttcggatgcaccatcccgcagcccagcacttccagccatttaccgtttttacccatgacgtccacttctgcagaaggttcggtaaacgggaagtaggaaggacggaagcgaatctgcaaatcttcctcaaagaagttacgcaggaagtcgtgcagcgtgcctttcaggttggtaaagctgatgttggtatcaacaatcagaccttccatctgatggaacatcggcgtgtgagtctggtcgtagtcgttacgataaacacggccaggcgcgatgatacgaatcggtggctgctgggctttcatggtgcggatctgtacgccagaggtctgggtacgcagcaggcgggtagtgtcaaaccagaaagtgtcgtggtcagcgcgcgccgggtggtgaccaggaatgttcagagcatcgaagttatgataatcgtcttcgatttccggcccggttgccacggtaaagccaagctcaccgaagaaactttcgatacggtcgatggtacgggtaaccggatgcagaccgccgttttcaatgcgacgacctggcagagagacatcaatcgtttccgccgccagacgcgcattcagtgcagcgctttccagttccgctttacgcgcattcagcgcctgctgaacctgctctttcgcttcgttgataaccgcaccagctgccggacgctcttctggcggcagctcacgcagggtcgtcatctgaagggttaagtgcccttttttacccaaatattcgacgcgcacattatctaacgcggcaacatcactcgcctggctaatggccgccttcgcactggcaaccagttctgcgagatgactcatggttttcctcattgtgtcagtggtgacactggttcgttggacttagagcctatcccatcaggctattttacttgccattttggtcccgggctgtgctcgaaattctcacgtacttaaatacgctccggtttctccgcgctggccgtgtccagtctggctgcgacaattacacctgatgagacaggctttttatttttcaaaacgcgcatacaaaaaaagcctccactgggaggctttcaggcgctgttttccgtttctcttctcacgcgctagcctcctggattcaggtgctaaagtaaaaaaagaagcggaaaatagcagcattcattgcttgcgttaccttttggtactcttcaaaagacctttattgaaaaggctacggcgataaaagtcaatgttttgatggcgttgaaacgaaaagagggagactagctccctctttcaactggcttatgccagagctgctttcgctttttcaaccagagcggtgaacgctactttgtcgaatactgcgatatcagccaggatcttacggtcgatttcaacagaggcttttttcaggccattgatgaatttgctgtaagaaataccgttctgacgtgctgctgcgttgatacgcgcaatccacagttgacggaactgacgcttacgttgacgacggtcacggtaagcatactgaccagctttgataacagcctggaaggcaacgcggtatacgcgagaacgcgcaccgtagtagcctttagcttgtttcaaaattttcttgtgacgtgcacgtgcaataacaccacgttttacgcgagccatatgtgctctcctgtatctatattctaattaaaaagttaaaaacgttaacggcttatgcgtacggcaggcacgcgattaccaggcccagatcgcctttggaaaccatggctttcggacgcaggtgacgtttacgtttggtcgcttttttggtcagaatgtgacgcaggttagcgtgcttgtgcttaaaaccacctttaccggtttttttgaagcgcttagcagcaccgcgtacggtcttaatttttggcattttaataacttccacttcgcattgttaataaacgaaacaaaggcgaacaaagcctgtgaagcccgaaggctccacagacagtgctacttgaaggccttactgtttcttcttaggagcgagcaccatgatcatctggcggccttcgatcttcgttgggaaggattcgaccactgccagttcttgcaaatcgtctttcacgcgattaagcacttccataccgatttgctggtgcgccatctcacgaccgcggaaacgcagcgtgattttggctttatcaccctcttcgagaaagcgaatcaggctgcggagttttacctgatagtcgccttcatctgtaccaggacggaatttaatttccttaacctggataactttttgctttttcttctgttccttagaagacttgctcttttcatagaggaatttgccgtaatccattatacgacaaaccggcggctcggcgttagggctgatctcgactaagtctactccggcttcttctgctttctccagagcttctctcagactcacaataccaagctgctcgccttccagacctgttaagcgaacttcctgggcgcgaatttcgccattgatacggttagggcgcgccgtttgaactcgttttccgcctttaataccttattcctccaattgtttaagactgcggctgcgaatctcttgttgcagcttctcgatcacttcatttacgtccatgcttcccaggtctttaccacggcgggtgcgaacggtaactttgccactttccacctctttatcaccacagaccagcatatatgggacgcgacgcaaagtgtgctcgcggattttaaagccaatcttctcatttctcaagtctgctttaacacgaatgcccgcattacttagtttttgcgtcaattcgttaacgtattcagactgactatcggtaatattcatgataacaacctgaaccggcgcaagccaggtcgggaagaaaccagcgaactcttcggtcaggataccgatgaaacgttccatgctccccagaattgcgcggtgaatcattaccggtactttacgttcattgtcttcgcctacataagaagcgctcagacgagacggcaaagagaagtccagctgtactgtaccgcactgccatgcacgatcgaggcagtcatacagggtaaattcaattttcggaccgtagaaagcgccttcacccagttgatattcaaacgggatgttgttttcttccagcgcaaccgccaggtccgcctcagcacgatcccacatttcgtcgctgccaatacgtttttcaggacgagtggagagtttgacgacgatcttctcgaagccaaaagtgctgtacatatcatagactaaacggatacatccgttaacttcatcgcgaatttgttcttcagtacagaagatatgcgcgtcatcctgggtaaatccacgcacgcgcatcaggccatgcaggctaccactcggctcgttacggtggcagctaccaaactcggccatacgcagcggcagatcgcgataagacttcagcccctggttgaaaatttgtacgtgacccgggcagttcatcggcttaatgcagtattcacggttctcagaagatgtggtgaacattgcatctttgtagttgtcccagtgaccggttttttcccacaggacacggtccatcatgaacggacctttaacttcctgatactggtactctttcagtttagaacgaacaaacacttccagttcacggaagatggtccagccgtcgttgtgccagaataccatacccggcgcttcttcctgcatatggtacaggtcgagctgtttaccgattttacggtggtcgcgtttcgcggcttcttccaggcgctgcaggtaagcgttaagtgcttttttgtctgcccacgccgtaccgtaaatacgttgcaacattttgttgttgctgtcgccacgccagtaagcccctgccgttttcattagtttgaaatgatggcagaaacgcatgttcggtacgtgcggaccgcggcacatatcgacatattcttcatggaagtacagacctggcttgtcatcatgggcgatgttttcgtcaagaatggagactttgtagctctccccacggttggcgaaagtttcacgcgcttcgtgccagctgactttcttcttaatgacgtcgtagtttttctcagcaagctcatgcatccgcttctcgagtgcttcgacatcttcctgggttaacgtgcggtcaagatcaacgtcgtaataaaaaccgttgtcaataaccgggccgattgccattttggtatgcggccaaagttgtttaatcgcgtgccctaacaggtgcgcacaggagtgacgaatgatctccagaccttcttcgtctttggcggtaatgatgctcagttgtgcgtcgttttcaatcagatcgcaagcatcaaccagttcgccattaacgcgccctgcgatacaggctttcgccagacctggaccaatgtccagcgcaacatccatggggcttacagcgtgatcgtaatggcgttggctgccatcaggaagagttataacaggcattttatatccttatttgcagtggtgacccacacgaaagatcacatacaaagaaaaatttgtttattaacagttcattgcgaaaccatctagccaacaaatgctaaattggttcgcaatcaggtacacaaatgaaagacattaacctctcaccttccacccggttgagcgatgttaacactaaaaaaagggagattgtacctttccgtttcacattgattcgattcgcaattcgtttgtagtgagtacaccagcaaaacgcttaaagaacaactgataacatcacggtgcgtctgaaaggtttactgcgagcggatttacagcagcataaactgaatccagcaaagttcgttgcgtgatttggcggtagtattttaaacgctcatgagattaatgacgaagtggtcatatcacaatgataaaagtgacacaattcttataacaatttttcgtgcacatttcgttctggcgataataattaatcatcatcctcaaaacctccagatatatataaggcgaacagattatgagtcaaaacgatatcattatcagaactcattataagtctcctcatagattgcacatcgatagcgacataccaacaccttcatcagagcctattaatcaatttgcgcgccagctcatcaccctacttgatacctctgacttaagttcgatgctgtcatactgtgttactcaggaatttaccgcaaactgtcgaaaaatatcacaaaattgttattccactgccctttttaccattaactttgccacttcacccatccatacagaaaatatactcattacattacactataaaaaagaaatcatttccttattactggaaaccacgcctattaaagctaaccatttgcgaagcatactggattatattgaacaggaacagttaactgctgaagatcgtaaccattgtatgaaactgtctaaaaaaatccatagagaaaaaaactatacacccaacagtaaatctcaatggtagtgcatgttttttgcaatctccttctgacgctattttttgtcgccatctgtcattgcaatacgcccttgattcattgagaaatggaaaaggcaaagtcaacctgattaaacattactcctccgttgaatccatacagcagcatgtccccttagtccgggacgcggagttcagagcattacttcgccatcctcctgcagggagtcgcgttatcgcgagtaaggattttggcttcgctttagatattttcttttgtcgaatgatggcaaacaatgtcagtcatatgtccgcgattttatatatagacaatcatactttgtcagtaaggctacgaataaagcagtcagtgtatggacaattaaattatgttgtgtccgtttacgacccgaacgataccaacgttgccgtcagagacacccacaggacagcacggggctttctttcgcttgataagttcatcagttcaggtcccgatgctcagacctgggctgatagatatgttcgcaactgtgcaattgctattctgcccctattacctgtgggagttccaggggctattttcgcgggtattgcatcacgaatgccatttgcccctatacatccatcggcaatgttgttaataatggctacaggccagtctcaacagcttattacattattcaaacagttgcccatactccctgaaaaagaaatcattgaaataataactgcgcagaatagcgttggtacacctgctttatttttggctatgatgaacggacatactgacaacgtgaaaatatttatgcaagaaattcagtcactggtagataatcacatcattcatgaagataatctggttaaattactgcaaactaaaagtgctaacgaaacacctggactttatatctccatgttgtatggattcgatgaaataatcgatatctttctgaatgcattaaccactccaatagcacaagagcttttaaacaaaaaactggtgatgagtattttagccatgaaaatacatgatggtgagccaggattatacgccgcaatggaaaataatcaccctttgtgtgtcacacggttcctctctaaaattaatggcatcgcctttaaatacaagttgagcaaagctaacatcatggatttattaaaaggagctacagcacagggaacccctgcattatacatcgccatgagcaagggtaatgaagacgtcgtgttatcttatatatcgacgctgggtgcttttgcaaaaaaacattcttttagtcaacatcagttatttacactattggccgctaaaaatcatgacaacatgtcagctgttcatatagccattcatcataagcattataaaactgtagaaacatattatgctgctattaatgcaatcagccaaagcctgagttttagtgctgatgaaataaagacgtatttataaccagctatttacgatatatatcgatacataattttatttttttcataaaacgcagaaacagtgaccatgtgcacaacgccacccgacggctgtaataacaaaaaatcccttgatgcctgtcccttttgttacactccgttatcacgcacaagagatatgcaggacactggtatgccgactaaacgctttgataaaaaacactggaagatggtggtggtgctactggcaatctgtggcgctatgttgttgctacgttgggcagcaatgatttggggctgagcagtgacaaacgaagacagccagaccgcataacacggtccggcagataattttacatgctgtagcccaggcttaaggttgtccgacggtcggtatgttccggtgcagactctggaggttcagagttccatgtgacgttgtaagccaccttcagtccaaaatgttcattaatagcaacatttaatgcgctttcggagttcagcgttgtgtcttccgcgccaaagacgctaacaccctgcgtaaatttagcgttgtcagtcaactgccatgcataagccccggaggcatagcccagcggctgggtttcactggcattgtcggtatatttgtcgtaacgcacacctggaccgaattcaaagcggaaactgtgtaccgggccattcaaaaactgacgaccataacccgcggtcaacacatcgcgctctcgatagccgttataacggtctgtcagccagcttgcctgaccaaataaatagtcataatcagttaaattaaaacggctacgcccgcccgccgcatatttttcactagaacgctcatcattagaagaagtattactggcgttcccccacaggctccaggcagtggtgtgtccataccaggtcatggtggtgtcagccgtaagactggagcttttcgtattgccactttgtgcaagatatcctgcgttcagattaccttcgaaaggttttttagcgctggcaggatcatccatgacagtaaaaacggaatcatcggcagctgcattcagactcgcaaacatgccccccgccaacataacgatggcaggaactgtcttcaaaagcttcatttatcaagagtccgtacaacaaaaaaagagaccatcgcggtcccggaaactttcttaaggatcaaagattagcgtccctggaaaggtaacgaattataaaaaggcgcgaataacttagcaatgtattcttatttcattttttgaataagcatgtggcgaaaacagatttttatttatatatatttatctgcaaaattttaaataaagctccaataaatcatattgttaatttcttcactttccgctgattcggtgccagactgaaatcagcctataggaggaaatgatggtacgtatctatacgttgacacttgcgccctctctcgatagcgcaacaattaccccgcaaatttatcccgaaggaaaactgcgctgtaccgcaccggtgttcgaacccgggggcggcggcatcaacgtcgcccgcgccattgcccatcttggaggcagtgccacagcgatcttcccggcgggtggcgcgaccggcgaacacctggttagtctgttggcggatgaaaatgtccccgtcgctactgtagaagccaaagactggacccggcagaatttacacgtacatgtggaagcaagcggtgagcagtatcgttttgttatgccaggcgcggcattaaatgaagatgagtttcgccagcttgaagagcaagttctggaaattgaatccggggccatcctggtcataagcggaagcctgccgccaggtgtgaagctggaaaaattaacccaactgatttccgctgcgcaaaaacaagggatccgctgcatcgtcgacagttctggcgaagcgttaagtgcagcactggcaattggtaacatcgagttggttaagcctaaccaaaaagaactcagtgcgctggtgaatcgcgaactcacccagccggacgatgtccgcaaagccgcgcaggaaatcgttaatagcggcaaggccaaacgggttgtcgtttccctgggtccacaaggagcgctgggtgttgatagtgaaaactgtattcaggtggtgccaccaccggtgaaaagccagagtaccgttggcgctggtgacagcatggtcggcgcgatgacactgaaactggcagaaaatgcctctcttgaagagatggttcgttttggcgtagctgcggggagtgcagccacactcaatcagggaacacgtctgtgctcccatgacgatacgcaaaaaatttacgcttacctttcccgctaacaaaaacattcccccagcattgggggaatcatcaccaacctgtcggcaacgcgtttctccgactatgctcaaaagtcatgtgataacaaaggggtgaactatggccagtggcgatcttgtccgttatgtcataaccgtcatgttgcatgaggatacattgactgaaattaacgagttgaataattacctgactcgcgacggttttttgctcactatgacggatgatgagggaaatatccatgagctgggaactaacacttttggacttatcagtacccaaagtgaagaagaaattagagaactggttagcgggcttacccaaagtgcaaccggcaaagatcctgaaatcaccatcacgacctgggaggaatggaatagcaacagaaaataaatggtttttgggcaataatcagtctgtggtgtgcgttagctcgtgtttttacaccgcattcttgcgctaaccttatgatctggcagacaacatgggagagacatcatgtggcaggcaatcagtcgtcttttgagcgagcagttaggtgaaggcgaaatcgaactgcgtaatgaactgcctggcggagaagtccatgccgcatggcatttgcgctatgcaggacatgattttttcgtcaaatgtgatgaaagggaactgcttcccggttttaccgccgaagccgaccaactggagttactgagccgtagtaaaaccgtcaccgtgcctaaggtttgggcagttggcgctgaccgtgactacagttttctggtgatggattatctcccacctcgtccgctggatgcgcatagcgcatttattcttggtcagcaaattgcgcgtttacatcaatggagcgaccaaccacaatttggccttgatttcgataacgcgctctccacaactccacagcccaacacctggcaacgtcgctggagtacgttttttgctgaacaacggattggctggcagttggaactggctgcagaaaaagggatcgctttcggcaatatcgacgccatcgtcgagcatattcagcagcgtctggccagtcatcaaccgcagccttctctgttgcacggcgatttatggtccggcaactgtgcactgggtccggatggcccgtacattttcgacccggcctgctactggggtgaccgagagtgcgacctggcgatgttaccgctgcatactgaacagccgccacaaatctatgacggctatcagagtgtatccccgctacctgccgatttccttgaacgtcaaccggtttaccaactctacacgctgttaaatcgtgcaaggttatttggcggtcagcatttggttattgctcagcagagtttggatagattattagcagcatgatatgggttgaggataatggccgctccgtgcggccttttgattaaataaacccaagcagagaaaagaacacataacctgcagcaatacaaataaccggcaggatatacagactgaaaaactgcaggaaaatagtatggtgcggaacaacaatacgggactcaatttgttcacgcgttagcccctcttcccctttggctttttccagaatgagttgatcttcaacaccttcccgcaagaagcgcgcctggcgactcatccgggcaccggaatcctgcaacgccagtccgacaaaaatcaggatgaaaatcacccagaacataacgttcacgccaccattaaaattgggcgtcggggagttataccagaatagattcaaaaaaggcgtattcgcctgcatcatatcgatcatgacatgagtaaagtcgagcatgaccgcattaatgccttccttgttttcctgccgggtattcataaatttcagcaaagaaatcaatgtagagatcaatgcaggtataaaaatcacccaacccaaaatccttttcaaaacagcaatgcgtccagcttgttgatacgtcatgagttctccttgattaagacgcgtcgtttcacttagtttacctgtagatatctgttttcgcccattctttaaaggcgatatgataggcgcttaatcataagcacggcttaataccttacacataatgctctaaaggagaggttgtaatgagtaccccgcgtcagattcttgctgcaatttttgatatggatggattacttatcgacagtgaacctttatgggatcgagccgaactggatgtgatggcaagcctgggggtggatatctcccgtcgtaacgagctgccggacaccttaggtttacgcatcgatatggtggtcgatctttggtacgcccggcaaccgtggaatgggccaagccgtcaggaagtagtagaacgggttattgcccgtgccattagtctggttgaagagacacgtccattattaccaggcgtgcgcgaagccgttgcgttatgcaaagaacaaggtttattggtgggactggcctccgcgagtccactacatatgctggaaaaagtgttgaccatgtttgacttacgcgacagtttcgatgccctcgccagcgccgaaaaactgccttacagcaagccgcatccgcaagtatatctcgactgcgcagcaaaactgggcgttgaccctctgacctgcgtagcgctggaagatagcgtaaatggcatgatcgcctctaaagcagcccgcatgcgttccatcgtcgttcctgcgccagaagcgcaaaatgatccacgttttgtattagcagacgtcaaacttagtagcctgacagaactcaccgcaaaagaccttctcggttaatgaccaggggcagtgatctcgctgcccctggttctttatctgaaattgcattcaactgacggattaatcgtcaatttaagagaaagagttacaccgtcaccacttccgtgcactgtataaaaatcctatactgtacgtatcgacagtttagtgagttttatcatgacggcggaaggtcaccttctcttttctattgcttgtgcggtatttgccaaaaatgccgagctgacgcccgtgctggcacagggtgactggtggcatattgtcccttccgcaatcctgacgtgtttgttaccggacatcgatcacccaaagagctttcttgggcagcgattaaaatggataagtaaaccgatcgcccgcgcttttgggcatcgtggttttacccacagtctgctggcggtatttgcgctgctggcaaccttttaccttaaggttccggaaggctggttcattccggctgatgcgctacaaggaatggtgctgggttatttgagccacatacttgccgatatgctgacacccgccggtgttcccctgctctggccatgccgctggcgtttccgcttgcctatcctggttccccaaaagggcaaccaactggaacgttttatctgcatggcattatttgtctggagcgtatggatgccccatagtttacccgagaacagcgctgttcgttggagtagccaaatgatcaataccttgcagatccagtttcatcggcttattaagcatcaggttgaatactaaaaaggcaaaaatcacctttctggaataagcaattccatttgaatataagagccagctcacagttctgttaatcttgcgccaacactatgactgctacgcagtgatagaaataataagatcaggagaacggggatgaactttccattaattgcgaacatcgtggtgttcgttgtactgctgtttgcgctggctcagacccgccataaacagtggagtctggcgaaaaaagtgctggtgggtctggtgatgggtgtggtttttggccttgccctgcataccatttatggttctgacagccaggtacttaaagattctgtacagtggtttaacatcgttggtaacggctatgttcaactgctgcaaatgatcgttatgccgttagtcttcgcctctattctgagcgcggttgcccgtctgcataacgcatctcagttaggcaaaatcagttttctgaccatcggtacgcttttgtttaccacgctgattgcggcgctggtcggtgtgctggtcaccaacctgtttggtttgacggctgaaggtctggttcagggtggtgcagaaactgcacgtctgaacgccattgaaagtaactatgttggtaaagtctctgatctgagcgttccgcagctggtcttgtcctttatcccgaaaaacccgtttgccgatcttaccggagccaatccgacgagtattatcagcgtggtaatttttgccgcattcctcggcgtagctgcattgaaactgctgaaggatgatgcgccgaaaggtgaacgcgtcttagccgctatcgataccctacaaagctgggtgatgaaactggttcgcctggtcatgcagttgaccccttacggcgttctggctctaatgaccaaagtggttgcaggttctaacttgcaagacatcatcaaactgggaagtttcgttgtcgcgtcctacctcggtctgctgattatgtttgcagtgcatggcattctgctgggcattaatggcgtgagtccgctgaagtacttccgtaaggtatggcctgtgctgacgtttgcctttaccagccgttccagtgctgcgtctatcccactgaatgtggaagcacaaacgcgtcgtctgggcgttcctgaatccatcgccagtttcgccgcctctttcggtgcaaccattggtcagaacggctgcgccggtttgtatccggcaatgctggcggtgatggttgcgcctacggttggcattaacccgctggacccgatgtggattgcgacgctggtcggtattgttaccgttagttccgcaggcgttgccggtgtcggtggtggtgcaactttcgccgcactgattgtactgcctgcgatgggcctgccagtaaccctggtggcgctgttaatctccgttgaaccgcttatcgacatgggccgtacggcgttaaacgttagtggcagcatgacagctggcacgctgaccagccagtggctgaagcaaaccgataaagccattctggatagcgaagacgacgccgaactggcacaccattaattcttatgctggcaacggtccgttttgtataggggccgttgccttactttttaaatgttccatcgcggcgatgcatacactctcatatttaaacagatcgtcagcgaaaaaaatgtccaacttatcaatacattcctggctcaaactatgtgcctgtaggctgaagcttaaaacctcatacccgagacgttttctaagactactatctggaatactcataatatcttcaagcacaccacttcccattcccggaagatttagtggattaaaaagaagattgatattaagcatacttattatgctaggaaactttaggagactctcatttttttgaatcgcagcaaaaatgctcccgacaggatgtatataattttgttcatagtatatagtccttaaatagtgaataaccaacctgttttttatactgatcaaattggtcattttttctgggcgaaatacagaagtgacatccattccaataaaatctttatttatacctcttatccgaatttcactaccataaagattattaattattactctatatttaacattgtcctgcagatatgtatcaaaactaagtgctggcgctcctggcttactggcatcatagttaatgttagacatataggcaatcatataattaaagttactttctgctatttcatcgcagtcacattgacccgtacttataaagaaagtgagtgctgtcatagtagactgcagcctttctttaaaagagtcgaaagccaggcttttaatatttaaatcaccataattactctgtattaagtttgtagaaaacatctcccgcctcatattgttaacaaaattattatctcatttaaatctaagtcatttacaatataagtttaagagcgacgccacaggatgaactatcaaaaatagctcatcatgattagcaaaacttaaccattttaaaataaataaacaattaaagaaaaaagatcacttatttatagcaatagatcgtcaaaggcagctttttgttacaggtggtttgaatgaatgtagcaacgaaatacagaatttcaggtcatgtaactcccggcaaaaccgggaggtatgtaatccttactcagtcacttccccttcctggcggatctgatttgcccaacgttgggcagattcaggcacagtaaacgccggactgcgcagaaaactctctcccatcagtacaaacgcaacatatttgccacgcagcatccagacatcacgaaagctatccatctttatcgcatgttctggcggcgcgggttccgtgcgtgggacatagctaataatctggcggttttgctggcggagcggtttcttcattactggcttcactaaacgcatattaaaaatcagaaaaactgtagtttagccgatttagcccctgtacgtcccgctttgcgtgtatttcataacaccgtttccagaatagtctccgaagcgggatctggctggtggtctatagttagagagttttttgaccaaaacagcggccctttcagtaataaattaaggagacgagttcaatgagccaacataacgaaaagaacccacatcagcaccagagtccactacacgattccagcgaagcgaaaccggggatggacagtctggcacctgaggacggctctcatcgtccagcggctgaaccaacaccgccaggtgcacaacctaccgccccagggagcctgaaagcccctgatacgcgtaacgaaaaacttaattctctggaagacgtacgcaaaggcagtgaaaattatgcgctgaccactaatcagggcgtgcgcatcgccgacgatcaaaacagtctgcgtgccggtagccgtggtccaacgctgctggaagattttattctgcgcgagaaaatcacccactttgaccatgagcgcattccggaacgtattgttcatgcacgcggaagtgccgctcacggttatttccagccatataaaagcttaagcgatattaccaaagcggatttcctcagtgatccgaacaaaatcaccccagtatttgtacgtttctctaccgttcagggtggtgctggctctgctgataccgtgcgtgatatccgtggctttgccaccaagttctataccgaagagggtatttttgacctcgttggcaataacacgccaatcttctttatccaggatgcgcataaattccccgattttgttcatgcggtaaaaccagaaccgcactgggcaattccacaagggcaaagtgcccacgatactttctgggattatgtttctctgcaacctgaaactctgcacaacgtgatgtgggcgatgagcgatcgcggcatcccccgcagttaccgcaccatggaaggcttcggtattcacaccttccgcctgattaatgccgaagggaaggcaacgtttgtacgtttccactggaaaccactggcaggtaaagccagtctcgtttgggatgaagcacaaaaactcaccggacgtgacccggacttccaccgccgcgagttgtgggaagccattgaagcaggcgattttccggaatacgaactgggcttccagttgattcctgaagaagatgaattcaagttcgacttcgatcttctcgatccaaccaaacttatcccggaagaactggtgcccgttcagcgtgtcggcaaaatggtgctcaatcgcaacccggataacttctttgctgaaaacgaacaggcggctttccatcctgggcatatcgtgccgggactggacttcaccaacgatccgctgttgcagggacgtttgttctcctataccgatacacaaatcagtcgtcttggtgggccgaatttccatgagattccgattaaccgtccgacctgcccttaccataatttccagcgtgacggcatgcatcgcatggggatcgacactaacccggcgaattacgaaccgaacagcattaacgataactggccgcgcgaaacaccgccggggccgaaacgcggcggttttgaaagttaccaggagcgcgtggaaggcaataaagttcgcgagcgcagcccaagctttggcgaatattattcccatccgcgtctgttctggctaagtcagacgccatttgagcagcgccatattgtcgatggtttcagttttgagttaagcaaagtcgttcgtccgtatattcgtgagcgcgttgttgaccagctggcgcatattgatctcactctggcccaggcggtggcgaaaaatctcggtatcgaactgactgacgaccagctgaatatcaccccacctccggacgtcaacggtctgaaaaaggatccatccttaagtttgtacgccattcctgacggtgatgtgaaaggtcgcgtggtagcgattttacttaatgatgaagtgagaagcgcagaccttctggccattctcaaggcgctgaaggccaaaggcgttcatgccaaactgctctactcccgaatgggtgaagtgactgcggatgacggtacggtgttgcctatagccgctacctttgccggtgcacctagcctgacggtcgatgcggtcattgtcccttgcggcaatatcgcggatatcgctgacaacggcgatgccaactactacctgatggaagcctacaaacaccttaaaccgattgcgctggcgggtgacgcgcgcaagtttaaagcaacaatcaagatcgctgaccagggtgaagaagggattgtggaagctgacagcgctgacggtagttttatggatgaactgctaacgctgatggcagcacaccgcgtgtggagtcgcattcctaagattgacaaaattcctgcctgatgggaggcggcgcaattgcgccgcctcaaatgatttacatagtgcgctttgtttatgccggatgcggcgtgaacgccttatccggcctacaaaactgtgcaaattcaatatattgcaggaaacacgtaggcctgataagcgaagcgcatcaggcagttttgcgtttgtcagcagtctcaagcggcgcagttacgccgcctttgtaggaattaatcgccggatgcaaggttcacgccgcatctggcaaacatcctcacttacacatcccgataactccccaaccgataaccacgctgagcgatagcacctttcaagctcgcacttgtcaacacatccagctccgttaagcgtgggaaacagtaagcactctgacggatagtattatcgataaacgccggatgacacatcacctccaggctacgatcaccccgatggcctgcgtcatccagcacttgcaggaacaggctctcactgatctcttcaccgtagaatgcactgctgaatccctgggtagtgcgcaggttgaccggcaaatcaaacgccatctgacgatccgcccgcaacgcaatgccctgctctgccgcaaacctggcaacaatcgggaaaatctgcgggaacatatgcacatgatgatggctatcaagatgcgtaggtttgcgtccaaatagctcaatgaaacgcaaatactgactgacaagctcctgagtaatttcttccagcggtaaagcatcttcttctgccaactgccagatccattttcccagcacaccatcgcgggttaaccccggcatagctgtcagtggcttacccatagtaaggacaaagtgcatccctatggccagactcggttcatcacgactcaactgcaccgcatggtcaatagcctgcccattcaccagcgccgtcgtgctcgtgacaatcccattgcgacaggcctcgataatgccgtagttctgacctttgcttaagccaaaatcatcggcattaacaatcagtaagcgttccataatcagcctcggttaatgtgcttttttaagctctgcgatgcagtcggcaaagtttggcagccatttctcgtgcgccagaatcatctcgcgtgccagcagctcagcatcgcgatcggaatgcaccaacggactaaggtttagcgccagtaacacatcgttaaattctccgctaagtgcggcgttactggcagcaatctcgaagcctttaatggtgtgaatcagccccattactttatcatcgaaatgcgtaatgcgcggatgtggcgtcgcgccatcgcgccccagcttacaggtcatttctactgcccagtctgccggaatattatcaatctgcccatgatgcgggatattaacgtaatgttctgcttgcttgtcgttgtagatagcgttgatcacttcgcatgctgcatcagagtaataagccccaccgcgctgttccagttctttcggcttaactttcagctcaggatttttatacagctcaaaaagttgtttctcgactttctgtactacctgcgctcgtgcgccgcctttgtagtattcgcccatttcaatagccagcatctctttctgcttgaagtaatacagcagataagaacatggcagcagattcaagctacgaattaagccctcactaaatggcagatcgaaaatattttttacagaggacgcttttaactgcccactcgccacaccatcaagcaattcggcaaagcggctcttgccatttatcagcacatccttaatgaacaccatatggttgaggccgaacaaatcgatagataaatcatcgctgtctttcagcatcagaacatcgcgaataaacatcttcatgccgatcggaatattacacacgccgataaagcgtttaaatccggtatgacgataaacggcttcagtgaccattcccgccgggttagtgaagttaatcacccatgcattcggacaaagttcttcgacatcttttacgatgtcaaaaatcaccggaatggtacgcagacctttaaacaaaccgcccgcgccgttggtttcctgaccaagataaccatgacttaatggaatacgttcatccagttcacgcgccggtaattggccaacgcgcagttgggtagtaacgaaatcagcatctttcaatgcttcgcggcgatccagcgttttataaagcttcatcgggacgccagcgttatcaatcatccgttggcagagatcgaaaataatatccagtttcggtttaccaccttcgacatccaccagccataattcgctgaccggcaattcgtgataacgcttaataaatccttccagtaactccggggtatagctgctcccgccaccaatagtgacgacttttaatttctggctcataatttctcccttcagtacagaatactgatatctggcatatctgccccccggacataaataatccagcaacaggacagatatgtgaattgtcaggtataacgacttgctgattaaattcagtcaatttcttacgatagctcttaggcgtaaaggacgttaatttcttaaacgttttaataaacaaactcgggctactataaccggcctcaaacgcaatatccgtcacactatagttggtcatttccagttgttttttggcaaaattaatacggatttcattaataatctgcattggcgttttgccataatatcgttgagtcgctcgcgtcaaatattcctgacttttggcactcaacgccaccatattctccagcgcgctttcactaaactgctctttatcatgcatcttttctaccgtacttttcagccactgcggtacatcatcaatcacctgttcttcgcggtaatgacgtaaacggttaatgacataaaaagtaaccatctcaacaaactcttccagccctgtttcgcggaaattcaaactagaaatcactgtttccacataggtgagaaaagcgttattggtccggtatacctggctagcgacaaagcaataaggcaacaatggcaggtaatgctgctcaaaaaagcgtttactgatcccaacgttcaatatgcgcgtggcaccaaactcataaaaactttgatggtggctacctaacgaaataaaaacaaaatcgccccgttccagtaacacgcgcttaccgttaatctcctggaaataacgcccggttaataccagagtaaattcataatagtcgtgctgatgcagtccgctgatactctcagttttgttatagataaacacatggaagtttttgccattaaacaactgctgttctcgggcagtggcaatttccggcgcgttaatcactggctgcatcatcgactccttatgccttcagtttttcatgaagctcaattaattcagtaatcagttcacgcgcaagcatggacgtcattaaatgatcctgagcgtggaccagcaccagactcactttcatcttaccttcgcccgcatcgccttcaatcagtttcgtctgtaccagatgcgcttcattcaatgccatccgactctgatccatcatggcttttgctgcggcaaaatcgccctgcttcgcctgtttcagtgccgcatacgccaggctgcgcgcttgtccggagttgatgatcagccccatcaccacttcttccagctcttcagcttccgtttgcgtatcgggaatgttatcgagatccatcatacatcgttcctctcttttcttaccggcacgattacccgtaccggcatcgattaaaatttcagggcgttagcgatatcttcttcgctctcttctttatcaatcgcattttgtgctttgttagccaccacaacaaagggcagataaattaacgttgcgatgccaaggttgaagagtgcgaccagcaatgcggcgacgctaccgttggtgttaaagaaggctcccagaccggttggcatggtccacggtgcaatattggtcaccggaggaataatgcccatgtagtacgctgcgagggtgattgccgccagaatcggttgtaccagtacaaacgggataaacatcaccgggttcatgataattggcagaccaaacagaatcggttcgttaatctggaagatgccggacggcagcgccagttttgccacctgacgataatcagcacggcgagaggcgataaagatagccaggatcaggcctaaagtcgcaccactgcccccaaggaaaataaaggagtccagcatcggcttggcccagatatggaaggtcttaccggctgccagcgccgcttcgacggaaccatattgctgataggtcgcgatattttccagtgcccacggcgtcataatgccgttgtccagtgcggtcagcgccagcgcgccatgaataccgaagaaccagagcagtggaacaaagatcacataggcccagcccaccacgctacccaagcttgccagtggggtactgatggtatccataatgatctgatggaagttggtgccccaggtattcaacgcccaggcaataatccccatcacggaaagaataataaagccgggaattaatgcgctgaaggaacggcttacactagcaggtacgctgtcgggcagtttaatgacccaattgcggcggacaataaaggtaaacatttctgccaccaccaggccaataataatcccggagatgatattcgccccacctaaccagtttgcaccaaccgcataggcctcaccgacactatatggggtgacggtcataaatgctgcaacggataacaacccagccgccagcgcatcgactttacgctcttctgccagcgccatgccaataaagaacggtgccattaaagacattattcctaatgttccgttatatacgttgccgccaatacctttcagaccattaagtgtttcaatggtactggcgtcgaggcgaatacctaaggaataaaaaaagctcccctccccaaagcttagaaaaacgttgttaattaatacaaacatggcccccgcaagggttaacggcattaagcgaataaagccatttttgattgcattaacgtgtggctgctttcctattttaactgcaaaagggaggagtaccttttcaaggcttgcaataacattactcatagaaaaatacccttaaaaaccgcaatttaaatattgcggtattgatttatgaaataactctttgacgggaaaatttaaaataaattaatttgctgcggcttttttaatcgctgcaaccgcagccttaagcacgcctaaaccatcgactttgccataaagcaggctgtcaattacttcaaccggtttgttgggtaacaaacgctggatttcgggcaacatataagcaatctgcggccctaataacacgacatcggcattctgacctttttcaccagccagtgtttccggaaatgcttcaataatgaccggaacttcatatttttctgcctgtgcgcgcattttacttaccagtaaagaggtagacatgcccgcagaacaaaacagataaatgtgtttcttttccataaaactgccctcatcgacgattatctgtcagccagacactccgcaagccttaacctgcttccatgctctgggtaacttgcgaaaccaacatgactttttttgtggctgaaaggagtatacggtatagacctgagcaatagtatttctttgaccttataaattgtttctccttgacctgtggttatgaccctcttcacatttcgggcaaataattcgcgaagataattaagaactcaggccaaaaaaaaccggcgcaatggccggtttccgttgttactcaagctttcagacgaattgattacttcgcagcctgtggatcagtgtcgtattcagcacaggtctgataaccggagttgatgacatatccggtatcatctaacgcgacaaagtaggtttctgctttaccatcacgttgacccaggatgtaggtctggcaagtaccgcgagcatggatcatgctcacttcagagctaggtttacccgcaatttgtgcaacctgcgcccggctcatgccttttttgacgtctttcaccacaggctgtacaaactggtctttggtacgatcataagccgtacaacccgccagcatggttaataccgccgctgcactcagaattcctgccatattcttgttcatattccgtcctcttgtttatcagcgtgttagataagcctggaatacattgggcgctttttcaagcccgtgaacgaaacggctccgctttcagaggattcctgtatgacgttttaaccaccattcagcccgctgtcgcttgtcgtttcagtagcaacgggttagctttaaggaagttttgtcttttctgtctggaggggttcaatgacattgcaacaacaaataataaaggcgctgggcgcaaaaccgcagattaatgctgaagaggaaattcgtcgtagtgtcgattttctgaaaagctacctgcaaacttatccgttcattaaaagtctggtgctcgggatcagcggcggtcaggactccacgcttgccggaaagctgtgccagatggcgattaatgagctgcgcctggaaaccggcaacgaaagtctgcaatttattgccgtacgcctgccctatggtgttcaggccgacgaacaagattgccaggatgccattgcctttattcaaccggatcgcgtattaaccgttaatatcaagggcgcggtattggccagcgaacaggcattgcgggaagcaggcattgaactgagcgattttgtccgtggcaatgaaaaagcgcgtgagcggatgaaagcacaatatagcattgcgggtatgaccagcggtgtcgtggtgggcaccgatcatgcagcagaagccattaccggattcttcactaaatatggtgacggcggtacggacattaatccgctgtatcgtctcaacaaacgtcagggtaaacagttactggcggcattagcttgcccggaacacctttataagaaagcgccaacggccgatctggaagatgatcgcccttctctgccagatgaagtggcactcggcgtgacctatgacaatatcgacgactatctggaagggaaaaacgtacctcaacaggtcgccagaacaatagagaactggtatctgaaaaccgaacataaacgccgtccgccaattaccgttttcgatgatttctggaaaaagtaataatttgcacatattggattgtgcgaaaaagagtaatttgttcacgccggatgcggcgtgaacgccttattcgacctataaaactatgcaaattcaatacattgcaggagtcgaataggcctgacaggcgtagcacgtcagacggtgtaacctttgtcatcgacccgcctcttttttaatcgcttcccgcctgttacactggatagataaccagcattcggagtcaacagtggtacggcgtttaacttctccgcggctcgaatttgaagctgcggcaatttatgaatatcccgaacatttacgtagtttccttaatgacttacccacccgaccaggggtgtatctgtttcatggtgaaagtgacaccatgccgctctatatcggcaaaagcgttaacatccgcagccgcgtcctttctcatttacgtaccccggatgaagccgccatgctacggcaatcccgacggatcagctggatatgtaccgccggtgaaatcggcgctctgctccttgaagcgcgattaatcaaagaacaacagccgctgtttaataaacggttgcgccgcaatcgccagctctgtgccctgcaattaaatgaaaagcgcgtcgatgtggtgtatgccaaagaggtggattttagtcgagcccccaacctgtttggcctgtttgccaataggcgcgcagctttgcaagcattgcagaccatcgctgatgaacaaaaactttgttatggcctgctgggactggaaccgttaagtcgcggtcgtgcatgttttcgtagtgcgctaaaacgttgcgccggagcatgctgcggtaaagagagccatgaggaacatgcgctacgcttgcgccagtctctggagcgtttgcgggtggtgtgttggccttggcaaggggcggtggcgctgaaagaacagcacccggaaatgactcaatatcatattattcaaaactggctgtggctgggggcggttaatagcctggaagaagcgacaacgttaattcggacacccgccgggtttgatcacgacggttataaaattctttgtaagccgctgctttccggtaactatgaaattactgaacttgatccggcgaatgaccagcgagccagttgattactgaacttgatccgggctatgaccagcgagccagttgatttcactgaacaacagtttaccttgcggttgtaaaagccgcagggtgtgcctgccatcgaaccagcacgcgccctggtcggtagtgagcaatttatcgcccagttgccacgccccgttaatcacaaacaccaccccgccgcgactgccaaaggtagtaaacgtacgttcggcaattctgactttcgccttacagacatccaggcgtgtcatgatgttgaaatccatgctcatctgccctgccgtcagtttcgcttttaccacctggtccgctgcaaaggcaaaaggctggaacggttttaaggtatggttaaagcggtctgcgctttcaaggagcatctcgccgccttccagcaacgtcactatcctttccatgccgggaaacaaagaaaactccccattcgccgcgatggatgcaatgctggcacgccagtaaaaatcacgttttgccggtgggaacgtgcaaatttcgcgcgtttcaccggcagcatttcgccacagattcacgctcattttacgcatatcaaagtattccatactcgctcccggcccgttcttttcattgttatcgttcaggtaaccgtggatggttatcggcaactcgggtgatttacgttagtggtgatcaggctttttttacaactgtttgagaagagaaaagaaaaccgccgatcctgtccaccgcattactgcaaggtagtggacaagaccggcggtcttaagttttttggctgaaagattattcagcagttgcaggcattttaccttttgccgctggacgttctgtcagacgcttctcaaaattagcattaaattgctttttctgttccggcgtcaggatgttgtaaattttgttctgggtttccatgtgcgccagcatgttagctttgcgctgttcttccatttttgcgatctgcgcttcagcttttactttatcgaaggtatcgctggcaatgatgtcatgcattgcgcggcgttcttccagcggcggacgtttcatctggtcacgctggcctttcatgatttcgcggatctgctgtttctgcgcgtcggtcaggttcaggtctttgaacatcatgtcctgatgcggaccgaacttgcctttgtggtgcatcatcggcttcgcgtcagccggtgctgcggtagtggtgtctgcggcatgggccaggttagccgcgccaagagccagggtagaggcaacaaacagtgcagttaatttacgcatattctatatccttcctttcagttatttattacggctttcttaagtagcgtgccgtgttgacgagattaactttactgactttagcgtcaattaatcagagcaacggtaaaacaatgaaagtgtaaaaaacacttttgcgccaattatggagaaaaaaagaaaatttgatggagagtgatgagagaatattacaacacgatgattttgcagagattatgaagaactataccggatgactggtgataaataaagcaaataaccaggattaatctgtattaatttataagaaagcaacttaatacccgcagaatgatttctgcgggtaagtattagcttattttttcgagcattaatcccgcgcgtaatcccaacgctaccaacggattagggaataacacatactctacatcatgggttacggtaaaacgttcctctccgtcctgcgccagcaatgttcctttctcaaacggcataaaattcagcgtgtcacttgccatatgcatttcgaaggacgggctgtggcgagtaatttggctaaccacccgataacggagcggcggtgttctcacgataccgacactctcaccagatagcagcgcagcaattgcgctggcagttactgcaaactggcgaagatcgttttgcccaaagggcaacgctttgccaagttccagcgtacaggccagcgcgccaaaatgtctggcgctgaaatgggtaaacgtaccaccaggttcctgatggaacaccagcgcctccagccccgccgcacccagccacgtcagaaatttctcgtcccagggaatgtcgcgttgcggtaatacaccgaactgcggatgcaaggagccacgaattgcggtatgtagatcaaggtgccagcgcacagattctttgccctggtcataaaaatcttccaggcactgttccagttcgcgcgcccgacaggtttctccgctttcagcaaatagctgccaacgaccgccaaacattcgattcatatcgctatggcaataacgtttcccttgcttcagcgcaggaggattcccgaggatcaccagcaaccgccaacgtaacgggatctcgccgtgagatatcgcgccaagcaacgcgtccagcatctccacaggtgccgtctcattaccgtgtattcccgcactaatcaccagtgcgccttgcggtggcgttaatggcgtcagttccagcacaccatcgcccagccagcgccagcgaacgccgttgatttctcgctcggtgataaccggttttttacccgttaaggtcagagcaagaaaattatccattgccccctccctcgcgctggaacggataaacgctaccgagattcagtaattggctcaatacatccagtgcttcccgcccttcgcgcagcaattgcgggtcggccagatcggcagcagtaaggcgatcgcggtagtaacgatccacccagtcattgagcgcattaaacagcgtatcgttcatcatcaccgccggattcaccgcccggcgttcttcttctgtcaataccacccgcaaccgcaggcacgccgggccgccgccattcgccatgctttcacgtaaatcaaagacttttagttcgctaatcgggttgtcagcggcaaggagttcattgagataaccccatactccggcgtgttcccgacactcctgaggcagcaccaacatcatggaaccatcatcgcggctcagcagttggctgttaaacagataggtagacaccgtatcagacacggaaacctgagttgccggaacttctatcgccataaaaccattgacccgcgcacgcaggtttgccagtaactgactctggcgagcgaacgcctgttggtggcaaaacagcacctggcggttactcacggcaatcacgtcattatgaaaaacgccctggtcgataacgtccgggttttgctgggcgaaaatcacctgttggggattcacctgattcagccttgccaccgcctcgctggcttcgcgagtctgtcgcgccggataacgggaaggccgggtatcattgccttcttctcgcccgtagacaaaaagttgcatacccggttcaccgtaatgaccgccgagacgattgtggtttgccgccccctcatcaccgagcaacgctacctgtggcaacgcgctatggacgctaaatttctcttcgtcgttaaaaatcgcttttaacaggctttcagtgacgggcgcttccaggctacggtgaaatttattgttcaggttggcaacggtgagatgcactttgccatccagcgtatcggcagatggcgcgatcgttgccgcattggctacccacattgggctagcggaactgacgctggaaagccagtgcggtgcctggcgtgcaactttttccagtacctgctcatcgctaccactgaatcccaactgacgcagcaccggaataaacggacgctcgtgcggcgggatcacggcctgggggaatcccgcatcggcaagggctttcattttcagtaagccctgcttcgccgccagtcgcgggttagacacctgaaaacggtgacgggtagaggcttcattaccaaagctcaggcccgcgtaatgatgcgtcagccctaccagcccgtcgaaattgacttcccaggcgttcatcgcaccacctcatcggaaaaatccagcccggggttaagcgtggcgggcaatgttaagctgtcgctctccaggctcgccatcggccatgcgcagtaatctgcggcataccaggcgctggggcgatggttaccggaagcaccaatgccgccgaatggcgcggtactggcagcaccggtaagcggtttgttccagttaacaatccccgcccgcgcctccagcaacagttgatcgaacttttcccgctcgggggaaaccagaccgcaagagagtccgaagcgagtgttattcgccattcgaatcgcttcatcgaaagtatcataacgccagacgcgcaataacggtccgaacacctcttcatctggtacgccagcaacgcctgtcatttcaatgatccccggcgtcagcaagcttgtccctgcttgtaataagcgcggcgcaagcaggggtcgtccgcccatcgcttccagttgctgccatgcagtaaccacctgctgtgcggcctgttcagaaatcagcccgccaataaacggctgcggttcgtcatcccagttgcccggcgttaatcgctggctgacggcaaccagacgagcaagaaacgcatcgccctgcgccccgcttttcagcaataaacggcgggcgcaggtgcagcgttgaccggctgtgacaaacgcgctctgaatggtcagatggacagccgcgtcgatatccgccacctcatcgataattagcggattattaccgcccatctcaagggcgagaattttctccggctgaccggagagctggcgatgcaactggtagcctgtattggcgctaccggtaaacagcaaaccgtcgagatcctccagcgcactcagcgcctgacccgtttcacgcccgccctgcaccaggttcagcacgcctggcggcaagccagcctgctgccataaacgcattaccgcttcgccactccacggtgtcagttcgctgggtttaaagataatggtgttacctgccagcaatgccggaacgatatgtccgttcggcaaatgaccagggaaattatacggcccaaacaccgccagcacgccgtgcgggcgatgtcgcaggctcgccgcgccgtccggcatttcactacgctgctcgccggtacgaacgtgatacgccttaatacttatcgcgattttattgatcatcgccgtcacttcggttgccgcttcccagcgcggcttacccgtttctctggcaataatcgcggttaattcggctttattgctttccagcagtgcggcaaagcgttcgacaacggcatgacgttcagcaaaactaagccgcgcccagcgcggaaacgccgcacgggctgcccgacaagcctgctcgacctgagcggcatcggcatcattgccttgccataacacctcgccgcttaccggattacgcttcacacggcttgcgccctggcccgttatccagtcaccgttaatccataaagtcatgctgttttctcctctgcgcacaggcgcaccagacgaacgcgatccccggcgtggcatttgagggcatccagttgtgcggcggttaaaatcaaacgctcggttgccggatcggtacgcaccagcaccacgcggaaatggtgataattttcattggcgaccaggcaggctgggaaatcgccctgcgcaggctgcccttctgccacttccaccagccgacttttacggatggcgcgcacgcggtcgatgtcacactcaagcgtcggcccaccgtcaaagatgtcgatatagttacggtagcgaaaaccttctttctccagcaccgcgcgggcaggcgcggtttgcggatgtacctgaccgatgacgtcctgggcttcctgggataaaaagtgggtatagatcggatgtttcggcatcagttctgcaataaatgccttttgcccggtgccgcagagaaaatcggcgcggctaaaatccatgctaaagaagcgtttaccgaggctttgccagaacggactatagccgtgttcgtcaatcaccccgcgcatttcagcaaccactttgtcattaaacttgtcgcgaaaagccgccataaacataaagcggcttttgctcagcaaatagccgttgccctctttgcgccagtccgggtcgagaaacagcgtgcacagctcgctgctgccggtgtgatcgttactgagaaacagcgtcggcaatgcgttatagacattcagctctttactggcgtgaaccaacgtgccgacgcgatagttgtaccagggatcgttcagcccaaccgccacctcaatggcacaaatccccgccacggtgcctgtctcgctatcttccagcacgaacacatagccctgctcacttttgggcagttcgccttgccaggttttgattgccctttcgatacgcgcgctaagcgtggcttcattggcgggaaggctcgtcaggccgccgcccgttttgctggcaagctgcatcagcgcgctgacatcacttcgctcaacgggacggatgaccatcatgatgaacctcggctaacaaattatttcaactactacctcggctaacaaagtgttcgcaagcagctgcaaagcgatccagtccggtcgtcacctcttcttcgctgacattgagcgcaggcgcaaaacgcaccacgttgccacccgcaatcagtaccatcacgcctgctttcgccgcttcctgagagatctgtttcgcttgcccggcgtaatcggcattcagtacacagccaatcagcaaacctaagccgcgaacttcactgaacaaaccatagcggtgattaatagtattaagacgctcaacaaaccagtcgtgacgctgtttaacgccattaagcatctctggtgtgttgatgagctccagcactttgcctgccaccgcgctggccagcggattaccgccataggtggtgccatgagtgccaacggtcatcacgcgggcgcactcttcggttgccaacaacgcaccgaccgggaaaccgccgcccagcgctttggcggtagttaacagatcaggcgtcacgccgtagtgcatataggcatacagttccccggtgcgcccgacgccggtttgtacttcatcaaaaatcaacagcgcattgtggcggttacacaattcacgcagaccttgtaaaaacgcgttgctggctggcaccacaccgccttccccctggatgggttcgacaatcaccgcacaggtagagtcgtcaatcagcgcgctggcagagttaatatcgttatatgcagcatgacgaatatccgccggcagtggcgcaaaatcctgactataggctggctgcccacccgcactgacagtaaacagcgtgcgaccatgaaacgcatttttgaacgccacgatgccgctcttatggctgccgtagcggtcgtgagcgaatttacgcgccagttttagcgccgcttcgttggcttccgcaccggagttacaaaagaagacgcgatcggcaaacgtggcgtcgatcaattttttcgccagtcgcagtaccggctcgttggtgtaaccgttgccggtatgccagaacttactcgcctgttcgttcagcgcttcacgcagttccggatgcgcatggcccagcgcgttcaccgcaatgccacccgcgaagtcgatatactctttcccctgctgatcccacaagcggctaccttcgccacgtaccggtataaagggtgccggagcgtaaacaggtatcatccattcatcaaagttttcacgcgtaattggctgagacatagcgacctctacagtaaataattcgttatttatatgttaataataagtaatgtttgcgctgtaaatgtagattgcagggttcgtgccagccagtgataaaagtgcataaacggcggaggctaactggaaatcaaggagttataaccaaaccatatgcatttaaagtgcatataaagtgaatacgtttgcgatgtgggtgaataaaaagaataaaaaacgcaatgttatgcagaagtaaaatataattctggaattgtgatcattgacgaaatttactggaaattactgcgccattctgacgcagcgcgcaccaaaagcgggcatttttttgcgccatcgttgacatcattaacaaccatcgatcaaatcacttaacaacaggcggtaagcaacgcgaaattctgctaccatccacgcactctttatctgaataaatggcagcgactatgaaatttgtctcttttaatatcaacggcctgcgcgccagacctcaccagcttgaagccatcgtcgaaaagcaccaaccggatgtgattggcctgcaggagacaaaagttcatgacgatatgtttccgctcgaagaggtggcgaagctcggctacaacgtgttttatcacgggcagaaaggccattatggcgtggcgctgctgaccaaagagacgccgattgccgtgcgtcgcggctttcccggtgacgacgaagaggcgcagcggcggattattatggcggaaatccccagtctgctgggtaatgtcaccgtgatcaacggttacttcccgcagggtgaaagccgcgaccatccgataaaattcccggcaaaagcgcagttttatcagaatctgcaaaactacctggaaaccgaactcaaacgtgataatccggtactgattatgggcgatatgaatatcagccctacagatctggatatcggcattggcgaagaaaaccgtaagcgctggctgcgtaccggtaaatgctctttcctgccggaagagcgcgaatggatggacaggctgatgagctgggggttggtcgataccttccgccatgcgaatccgcaaacagcagatcgtttcagttggtttgattaccgcagtaaaggttttgacgataaccgtggtctgcgcatcgacctgctgctcgccagccaaccgctggcagaatgttgcgtagaaaccggcatcgactatgaaatccgcagcatggaaaaaccgtccgatcacgcccccgtctgggcgaccttccgccgctaatttagcagctctcctggctcaaactgggtcaggagaattaaccttgagaaaaatcaacaaactgtcagtaatgatttgttgcctgccgtcctttgttataccgtctctgcgtttttagttgtctgaccacttctctattatcaagtttgatataggaaactccacgatgaacgctgagcgtaaatttctttttgcctgtcttatttttgcgctggtcatttacgctatccacgctttcggtttattcgatctgctcaccgatttaccccacttacagacactcatccgccagagcggatttttcggctatagcctctatattctgttattcatcattgccaccctcttgctgttaccaggaagcatactggtgatcgcgggaggaatagtttttggcccgctcttagggacactactcagtttaattgccgccacgctggcctccagctgcagtttcctgctggcgcgctggctgggacgtgatttactgctgaaatacgttggccatagcaataccttccaggccattgaaaaaggcattgcgcgtaacggtattgattttcttattctgacccgcttaatcccgttgtttccttacaatattcaaaattacgcttacggattaaccacaatcgccttctggccttatacccttattagcgcactcacgaccctacccggtattgttatttataccgtgatggcaagcgatctcgccaatgaaggcattacgctgcgctttattttacaactctgtctggcgggcctggcgctgtttattctcgtccagctcgcaaaactctacgcccgacacaaacatgtggatctgtctgctagccgccgcagcccacttactcacccaaaaaatgaaggataaaacgatgttgcaacattatagtgtgagttggaaaaaaggactggctgcactctgtttactggctgttgctgggcttagcggctgcgatcaacaagagaatgcggcggcaaaagtggaatacgacggacttagcaacagccaaccgctgcgtgtcgatgccaataaccatacggtaaccatgctggtgcaaattaatggtcgtttcctcaccgacgacactcgtcacggtattgtgtttaaagatggctccaacggacataaaagcctgtttatgggttatgcgaccccgaaagcattttatgaagccctgaaagaggcaggtggtacgccgggcgaaaacatgacgatggataataaagaaacgactcatgtcacaggcagcaaactggatattagcgtcaactggcaaggggcggcaaaagcgtattccttcgatgaagtgattgttgacagtaatggcaagaaactggacatgcgctttggcggtaatttaacggcagcagaagagaagaaaacgggttgcctggtgtgtctggatagctgcccggtcggcatcgtcagcaatgcaacatacacttatggtgcggttgaaaaacgtggtgaagttaaattcaaaggcaatgccagtgttctcccggcggataacacgctggcaacggttacctttaaaatcgccgaataaagccaggataaaggatgatgatgatgcaaagccgaaaaatctggtactaccgtataaccctcatcatcctgttgttcgctatgctgctggcatgggcgctgcttcccggcgtccatgagtttatcaatcgcagcgttgcggcgtttgccgccgtggaccaacagggtatagaacgctttattcagtcttacggcgcactggcggcagttgtcagcttcttgttgatgattttgcaggccattgctgcaccgctacctgcgtttttgatcacctttgccaatgcgagcctgtttggcgcgttctggggcggcttgctgagctggaccagtagcatggccggcgcggcgctgtgcttttttatcgccagagtgatgggccgcgaagtggtggaaaaattaaccggcaaaaccgtgcttgacagtatggacggctttttcactcgctacggcaaacacaccattctggtctgtcggttattgccttttgtccctttcgatccaatcagctatgctgccggtttgactagtatacgttttcgcagcttttttatcgccaccgggcttggtcagttaccggcaactattgtttattcctgggcgggcagcatgttaacaggcggtactttctggtttgtcaccggactgtttattctgtttgccctgaccgtggtgatttttatggcgaagaaaatatggcttgaacgccagaagaggaatgcctgatgggtttaccgccgcttagcaaaattcctttaattttacgtccacaggcgtggctgcatcgtcgccattacggcgaggtgctaagccccattcgctggtgggggcggatcccgtttatcttttatctggtgagcatgtttgttggctggctggagcgtaaacgcagtccgctcgatccggtagtacgaagccttgtcagcgcgcgcattgcgcaaatgtgcctgtgtgagttttgtgtggatatcaccagtatgaaagtcgccgagcgcaccggcagcagcgataaactgctggcagtggctgactggcggcaaagcccgctctttagcgatgaagaacggctggcgctggagtacgccgaagccgcaagcgtaacgccgccaacggtcgatgatgccctgcgtacccgactggctgcgcattttgacgctcaggcgctcaccgaactgacggcattgatcggcctgcaaaatctgagtgcccgttttaattctgccatggacattcccgctcaggggctgtgccgtattcctgaaaaacgttcttaaggagagatgatgcgccattgtgggtggttgctgggattgttaagcctgttttctctggcaacacatgccagtgactggcaagaaattaaaaatgaggccaaagggcaaaccgtctggtttaacgcctggggcggcgataccgcaattaaccgctatctcgactgggtgagcggcgagatgaaaacccattacgctataaacctgaagattgtccgtctggcggatgccgcagacgcggtgaagcgcattcagaccgaagccgcagccggacgtaaaacgggcggcagcgtggatctgctctgggtgaacggcgaaaacttccgcaccttaaaagaggccaatttattacaaacgggctgggcggagactctgcccaactggcgctatgtcgacacacagctgccggtgcgggaagatttttctgtgccgacacaaggtgcggaaagcccctggggcggcgcacaactgacgtttatcgcccgccgcgatgttacgccacagccaccacaaacgccgcaagccttactggagtttgctaaagccaatcccggcacggttacctatccgcgcccaccggactttaccggcacggcgtttcttgaacagttgctgattatgctgacgcccgatcccgccgcattaaaagaagcgccggacgatgcgactttcgcccgtgtcactgctcccttgtggcaatatcttgatgtgctgcatccgtatttgtggcgcgaaggaaaggatttcccgcctagtcccgcgcggatggatgctctgctgaaagccggcacattgcgcctgagcctgacctttaaccccgcgcatgcgcagcaaaaaatcgccagcggcgatttgcctgcaagcagttacagttttggctttcgcgaggggatgattggcaacgtgcatttcgtcaccattcctgccaacgcgaatgccagtgctgcggcgaaggtagttgccaatttcctgctcagtcccgatgcgcaactgcgtaaagcagatcccgctgtctggggcgatccttctgttctcgatccgcaaaaactgcctgacgggcagcgcgaaagtttgcaaagtagaatgccgcaggatctgccgccggtactggctgaaccgcacgcaggttgggtaaatgcgctggaacaagaatggctacaccgttacggtacgcattaatctttttgctgtgggcgatggtggcggtgatttatgcaccgctgatcccggcagctctcacgctgataagccctgctttgagcttgacacactggcaggcgttatttgccgatccacagttaccgcaggcattactggcaacgctggtgagcacaaccatcgcggcggtcggggcattgttgattgccctgctggtgattgtggcgctgtggcctgggccgaaatggcagcgtatgtgcgcccgtctgccgtggctgctcgccattccccatgtggcttttgccaccagcgcccttctgctctttgctgacggagggctgctttatgactatttcccgtatttcactccgccaatggaccgatttggcatcggtctgggcctcacccttgcagtgaaagaaagcgcatttctgctgtggatcttagcagcagtattgagcgaaaaatggctgttgcagcaggtcattgtgctggatagcctgggctacagccgctggcaatgcctgaactggctgctgttgccctccgtcgcgcctgcgctggcaatggcgatgctggcgattgttgcctggagcctgagcgtcgtggatgtggcaattattctcgggccaggtaatcccccgacgctggcggtaattagctggcagtggttaacccagggcgacattgaccaacaaacaaaaggcgcgcttgccagcctgctgttgatgctgttactcgccgcctacgttttgctgagctatctgctatggcgcagctggcggcgcactattccccgcgtagatggcgttcgcaagcctgccacgcctttattgccgggcaatacgctggcgatttttttacccttaaccggtgtgctgtgtgtggttctgctggcgatcctcgcggatcagagcacgatcaatagtgaagcgctcatcaacagcctgacaatggggctggtggcgacattcatcgctttgctcctgttactgctgtggctggaatgggggccacagcgtcgccagttgtggctatggttgcccattttattacctgctctgccactggtggcgggccagtacacgctggcgctatggctgaaactggatggaagctggacggcggtggtctgggggcatctgctgtgggtgatgccgtggatgctgtttatcctgcaacccgcctggcagcgcattgatagtcggttaattttgattgcgcaaacactgggctggagccgggccaaaatcttcttttacgtgaaatgcccactcatgttgcgccctgtgctgattgccttcgcggtgggatttgcagtcggtattgcgcagtatatgccaacgctgtggctgggcgcggggcgttttccgacgctcaccactgaggcggtggcattaagcagcggcggcagcaacggtattctcgccgcccaggctttatggcaactgctattaccgcttattatttttgccctgaccgcgttagtcgcaaaatgggtaggttatgtcagacaaggactccgctaatgctctgcgtgaaaaatgttagcctacgtttaccagaaagccgcttgctgacaaacgttaactttacggtggataaaggtgacattgtcacgttaatggggccgtctggctgtggaaaatccactctgtttagttggatgattggtgcactggccgaacagttttcttgtacaggtgagctatggctcaatgagcaacggattgacatcctacccaccgcacagcgtcagattggcattctttttcaggatgcactgttatttgaccagttcagtgtcgggcaaaatttactgctggcgctaccggcgacacttaaagggaatgcccgacgtaatgccgtgaatgatgcacttgagcgtagtggccttgagggagctttccatcaggatcctgccactttgtctggcggtcagcgagcgcgcgttgctctactacgcgcccttctcgcccaaccaaaagcgttactcctggatgagccattcagccgtcttgatgtggctctgcgcgataattttcgccagtgggtgttcagcgaagttcgcgccctggcgatccccgtcgttcaggtaacgcacgatctccaggatgttcctgctgatagttctgttctggatatggcgcagtggagtgaaaattacaacaaactgcgataacgcaaagtttttctcaatgcgtcagttcagaatggcgcactcaaaactacaatgtcgggattttcgatgaaacgtgtttctcaaatgaccgcgctggcaatggctttagggctggcttgcgcttctagctgggccgctgaactggcgaagcctcttacacttgaccagcttcaacaacaaaatggcaaagcgatagatactcgccccagcgcgttttataacggctggccacaaaccttaaatggcccttctggtcatgaacttgccgccttaaacctctctgccagctggcttgacaaaatgagcaccgaacagctcaacgcgtggatcaagcaacataacctgaaaaccgatgctccggtggcgctgtacggtaatgacaaagatgtcgacgccgtcaaaacgcgactgcaaaaagcaggtttaacgcatatctccatcctgagtgacgcgctaagcgaaccttcccgtctgcaaaaactgccgcattttgagcagctggtttatccgcaatggctgcacgacctgcaacaaggtaaagaggttacggcgaaacctgccggtgactggaaagtcattgaagcggcctggggcgctcctaagctttaccttatcagccatattcccggcgctgactacatcgataccaacgaagtggaaagtgaaccgctgtggaacaaagtttctgatgaacaactaaaagcgatgctggcaaaacacggcattcgccatgacaccacggtcattctgtatgggcgtgacgtatacgctgcagcgcgtgtggcgcagattatgctttatgctggtgtgaaagatgtgcgcctgctggatggcggctggcaaacctggtccgacgcgggactgcctgttgagcgcggaacgccaccgaaagtgaaagcggaaccggatttcggcgtgaagatcccggcacaaccgcagttgatgctcgatatggaacaggcccgtggactgctgcatcgccaggatgcaagcctggtgagcattcgtagctggccagaatttatcggtacgaccagcggttacagctatattaaaccaaaaggtgaaatagccggcgcacgttggggacacgctggtagcgacagcacgcatatggaagattttcataacccggatggcaccatgcgcagcgccgatgatattaccgctatgtggaaagcgtggaatatcaaaccagagcagcaagttagtttctactgcggcaccggctggcgcgcgtccgaaacctttatgtacgcacgcgccatgggttggaagaatgtttccgtgtatgacggcggctggtacgaatggagcagcgatccaaaaaatccggtagcaaccggtgaacgcggcccggacagtagcaaataacattgcaattactgacgctggaggctcttcagcgtcagatacccactccacacccgcgtaaaggtcgtcatccagcacaacgcaccgaagatccacgcaaaccacgcaaaccatgcagggaataaacatcccagcacaaacagtaagatcgtttctgtgccttcggttaatccccccagatagtaaaagctcttatgtgcataaccggggttatcaatctgatgttttgctgccagtgcagcaaaggcgagaaaactgctgcccgtgccgataaacgcaaacaacaaccagccgcctgccagcgcattttgctccggtgcagcaagaataaagccaaacggcaccagcgcgtaaaagagaaaatcgagagaaatatcaagaaagccgcccgcgtcggtaagctctctgcgccgcgccagcgcaccgtccagaccatcaagcagcctgttcaacaaaatgacgactagcgccgccagataccagcccagcgccagaaacggcagagccagcacgccgatggcaaatcccactaatgttaaaccatctggcgtaatgcccggtttatcaagaacccgcacgcactgatgcaacaacggtttaatccggggatgaagatggcggtctagcacaggcactccttaaatataaagcctttctgattgagcaacagtgcggatattatggcatttttcgcttatctgcccgtgtgtaatttatgaaaatgattgaagttgttgccgccatcattgaacgtgatggcaaaattttactcgcgcaacgccccgcccagagcgatcaggcgggattatgggagtttgccggtggtaaagtcgagccggatgaaagtcagcggcaggcgctggtgcgtgagttacgcgaagaactgggcatcgaagcaactgtgggtgaatatgttgccagccatcagcgagaagttagcgggcggattatccatcttcatgcctggcacgtacccgacttccacgggacgttacaggcacatgaacatcaggcgctggtctggtgcagtcctgaagaggcgctgcaatatccgctggcccctgctgacattccattattagaggcgtttatggctttacgcgccgccagaccagcggattaattatggctttacgcgccgccagaccagcggattagtgctaagggttttgtcatcacgctggcattgcagcagtattccttcggctttaattaccgccccttcagaataattttgatcctgataaacgcagcactgagtacagggctgcgcactctgcccgccactactgaacacttctggcggtacgtttacctccacgtccggacgataatgcgggttagccagtgcaattaatggaaatgctaatactacggcgaacaatgctcgactcacagggaactccttaacgttattgtctctgctactgataacggtagccgggtggcaaaactttagcgtctgagttatcgcatttggttatgagattactctcgttattaatttgctttcctgggtcatttttttcttgcttaccgtcacattcttgatggtatagtcgaaaactgcaaaagcacatgacataaacaacataagcacaatcgtattaatatataagggttttatatctatggatcagacatattctctggagagtttcctcaaccatgtccaaaagcgcgacccgaatcaaaccgagttcgcgcaagccgttcgtgaagtaatgaccacactctggccttttcttgaacaaaatccaaaatatcgccagatgagtttactggagcgtctggttgaaccggagcgcgtgatccagtttcgcgtggtatgggttgatgatcgcaaccagatacaggtcaaccgtgcatggcgtgtgcagttcagctctgccatcggcccgtacaaaggcggtatgcgcttccatccgagtgttaacctttccattctcaaattcctcggctttgaacaaaccttcaaaaatgccctgactactctgccgatgggcggtggtaaaggcggcagcgatttcgatccgaaaggaaaaagcgaaggtgaagtgatgcgtttttgccaggcgctgatgactgaactgtatcgccacctgggcgcggataccgacgttccggcaggtgatatcggggttggtggtcgtgaagtcggctttatggcggggatgatgaaaaagctctccaacaataccgcctgcgtcttcaccggtaagggccttagttttggcggcagtcttattcgcccggaagctaccggctacggtctggtttatttcacagaagcaatgctaaaacgccacggtatgggttttgaagggatgcgcgtttccgtttctggctccggcaacgtcgcccagtacgctatcgaaaaagcgatggaatttggtgctcgtgtgatcactgcgagtgactccagcggcactgtagttgatgaaagcggattcacgaaagagaaactggcacgtcttatcgaaatcaaagccagccgcgatggtcgagtggcagattacgccaaagaatttggtctggtctatctcgaaggccaacagccgtggtctctaccggttgatatcgccctgccttgcgccacccagaatgaactggatgttgacgccgcgcatcagcttatcgctaatggcgttaaagccgtcgccgaaggggcaaatatgccgaccaccatcgaagcgactgaactgttccagcaggcaggcgtactatttgcaccgggtaaagcggctaatgctggtggcgtcgctacaagcggcctggaaatggcacaaaacgctgcgcgcctgggctggaaagccgagaaagttgacgcacgtttgcatcacatcatgctggatatccaccatgcctgtgttgagcatggtggtgaaggtgagcaaaccaactacgtgcagggcgcgaacattgccggttttgtgaaggttgccgatgcgatgctggcgcagggtgtgatttaagttgtaaatgcctgatggcgctacgcttatcaggcctacaaatgggcacaattcattgcagttacgctctaatgtaggccgggcaagcgcagcgcccccggcaaaatttcaggcgtttaactgtatttaacggaacttgctccccacggaacatttcttatgggccaacggcatttcttactgtagtgctcccaaaactgcttgtcgtaacgataacacgcttcaagttcagcatccgttaactttctgcgatagcagcagatatgccagtaaagaaatcccatttgactatttttttgataatcttcttcgctttcgaacaactcgtgcgcctttcgagaagcaagcattatataatgccaggccagttcttcttcaattgtcccgttttgaaaagctgtgctacttatgctgatcatccaacttaattccgccgcccatattagcttcgcgctggatttaccggagctatgattagcgcaatcagagatatagtcactgggaaaaacagcaaatttattcaacaaggcgataacctgctctggggcttcctccatgtttgctttaaaggtattggctccatggtcgccagaaagaaaatgctccattaaggcacaataactttcgctatcttcgataccccattgatcctctaaagactcgcgtcttttacttatgatatcgatgctgtcaaaaggaagcacatgatattggaaggtatctttgccaggttcaggctttcgcggccagaactccagcgtttcagaccattgcttatgatagaatcgataaggtgcgatcaattgtagcgcctgtaacttctcgatactgagcggctcaatacctttagcctgataataatgcagttgttctttttttgctttaaaaccggcccgaacaataagccccatcataattaatagataaagaaaagagcatcccgcggtaatcaggcctctttcattcaaaccgttggatgttatcgctgcgaacacaaacattacagcgacaacacatgttaaataaaacccccacttacaaagcagcatggccttattttctttaatcatccgttcaaaattactattaaatatttcccagccattaaaagaatacttctcgctcccaggatggttttgtaataaaacttttttcatcacattccctgttattacatactttagaggcgataattttatccatgcaaaaaaaatatccaacgaattttcttgatccgctggatatttcagaatatgactcgaatagcacgaaagattcactcgcttacgctatcgccccgcttccgacttcatctgctggcggactttttttcgcactacgtttacgcggtgcagcctttttcttatcagcactgccaccactgcccggagccacaatgccgcgaaactgccgcaccggcgtacgtttggcttgatcaataagctgatatagcgtccccaccagcggctgcataaagtcctgatagcgacactgcttttcgctgatttgcgtcagcacgctttcccagtgcgcggtcatgtccggtcgcgtcgccatctccggcaggctatggaatagcgcttttccggcgtcggtggagtggatatagcgcccttttttggtcaggaaaccacgcttgaacaacagttcaataatcccggcacgcgttgcctctgtccccagaccatcggtcgcacggaggatctttttcagatctttatcctgcacaaagcgcgcgatcccggtcatcgcgctaagcagtgttgcatcggtaaaatggcgcggcggctgggtttgccgctctaccacttcacctttttcacacagcaactcatcgcctttcgccaccacaggcagtggcgtgccgtcgttttcttcatcgcgctctttgctgcctaacagcgtgcgccagcctgcttcagcaagaaaacgcgctttagcgacaaatttgcctttggcaatgtccagttcgataacacacttgcggaacaccgcatccgggcagaattgcatcagatactgacgggcaatcaggttatagaccttcgcttcgttctccgtcaggttgatcgcagaactccgtgcggtcggaatgatggcgtggtgcgcatcgacctttttgtcatcccaacagcggttgcgtatatctggatctaccactggctgcggcaacagatccggtgcatgaacactgatggcattcatcaccgcgtggcgtccggcaaaatgttcttctggcaaatagcgacaatcagaacgcggataagtgattagcttgtgcgtttcgtacagtttctggcagatatcaagcacgttctgcgcactcagaccaaaacgttttgccgcttcaatctgcaacgcactaaggctaaaaggcagcggcgcggattcactttcccgtttatcgttatagctggtgacaatagccggttgaccactaatgcggttaaccacatgctccgccagtggacgatgtaacaagcgcccttcttcatcctggtacggttcacacgcttcgctcggttgccagatagcggtaaaccgctcatcggcaggtgtcacgatatgtgctttgacttcaaagaagtctttcgccacgaagttttcaatctcttcatcgcggcgcaccaccagcccaagcacgggcgtctgcacgcgtcccacggaaagtacgccctgataaccggcattgcgaccgagaatggtatacgcacgggtcatattgatgccgtacagccagtcggcacgcgctcgcgccagcgcagaaacgcacagcggtacaaactcactgttggaacgaagacggtcgatcgcccgctcaaccgcctgcgggttcaggtcgtttatcaagcaacgctgtacctgctggcgcttttccggtgccagttgcagatagtccagcacttcatccaccagcaattgcccttcacgatccgggtccccggcgtgaacgatttcgctggcttcatgcaggaaccgtttgatgacgttaagttgtttggtcacggagggtcggggctgtaattgccacttttccgggacaatcggcaaatccgcaagattccagcgcgcatagcggctgtcgtaggcgtctggctgcgcctgctcaagcaggtgaccgatacaccaggtcaccacctgaccattaccgcactcgataaagccatcgcctttccggtgcggtttgggcaggacatcagcaatggcgcgcgccagactcggtttttcggcaataaacaaccgcattgaattaacgaatctcaaccatggcacgaccgccgcgcgctggcaccagttcgccaattgccgtcagttcaatgccaaactcggcggctgtagctttgacctcattttctgcttccggcatgaccgccagcagcaaaccgccagaagtttgcggatcacacagcagatcgcgcacttcacgcggcatttcacccatcagatgaccgtagctggcaaagttacgttcagtgccgccaggtactgcgcccaacttaatgtactcttcaacaccggggagtttcgggatcgcttcatagtcgacgcgtgcctgcacaccagccccctgacacatttcgctcaagtggcccagcagaccaaagcccgtaacgtcggtcatcgcttttacgccttcgatgttggcaaaggacgcgcctgcgatgttcatccggcacatcacttccgtcgccagtccctgatgttctggtttcaacagactttttttctcagccgtggtaagaacgccgatccccagcggtttcgtcaggaacagtttgcatccggcttgtgcggtactgtttttcttcacccgctcggtcggtacgatccccgttaccgccagaccaaaaatcggctccggcgcatcgatggagtgaccgccagccagcgcaatacccgcctgacgacatgcatagcgtccaccttcggtcacttcgcgggcaatttctggggaaagtttgttaatcggccagccgaggatcgcaatcgccataatcggtttgccccccatcgcgaagatatcgctgatggcgttagtcgccgcaatgcggccaaaatcgaaaggattatcaacgatcggcataaagaagtcggtggtactgataacgctggtgccattgcccagatcgtacaccgccgcatcgtcgcgggtttcattacccacaagcaaattcggatcaacaaacttcgcctgctcactatgcaggatggtttccaacacttttggggaaattttacagccgcaaccagctccgtggctgtattgggtcaaacgaatgctgttctcgctcatggacatctcctgtcaatgcaatccgggtatggtaaccctcattccgtgaagtgataagtgagagtgtctgaattcctgcgcctttgctcacaatccagacagtttcgcgacaattatcagaaataagttacaaacggcgtcgggtccgggacgttaatgctcgtagatgctttcagctgcggcgtaccgaggtagagaaaaccgacaattttatcctgctcacggcaaccgaatgcttcacgcactaccggactttcagttaatgcgccactgcgccagatgccgccaaacccctgggcaactgctgccatttgcatcgccatgaccgcgcatccggcagacatttcctgttcccagcgcgggactttatgattctcttcgcatttcgccaccaccgtgatgatgagcggtgcgcggaacggcgcattacgggctttgtcgatagctttgtcatcactaccggcagcaatcgccccctgttccagtacggcgctgaaacgctcgcgcccttccccttcaatcacaaaaaaatgccacggttgcatggacttatggtccggcgcacgcatacccgcacgcaggatgttttgcagttgttcacccgttggcgcgggttcagccaagcgggaggcgctacggcgattgatcaatagttcgagtgcatccatttgattaactcctgtcgtgatatttattcacaaaattaacacgagagtggattttgttacagcacagtccgcaattcctgctgacaagtaccggttgggtcattacgataaccacatctattgcgcctgtgacaggtgtgaccttaagttgggagaatacatgcgaaccctttggcgatttattgccggattttttaaatggacgtggcgtctgctgaatttcgtccgtgaaatggtacttaacctgttctttattttcctcgtactggttggtgtggggatttggatgcaggtcagtggtggtgatagcaaagaaacggccagtcgtggcgcactgctgctggacatttctggtgtgatcgtcgataaacccgacagttctcagcggtttagtaaattaagccgccagctgcttggtgccagttccgatcgtctgcaggaaaacagtctgtttgatatcgtcaacactattcgccaggcgaaggacgaccgcaatatcaccggtattgtgatggatctgaaaaacttcgcaggcggcgaccaaccgtctatgcagtacatcggcaaagctctgaaagagtttcgtgacagcgggaaaccggtttatgccgttggcgagaactacagccaggggcaatattatctcgccagtttcgccaataaaatttggctgtctccgcaaggcgtggttgatctgcacggctttgccaccaacggtctgtactacaaaagcttgctggataagctgaaagtttccacccatgtgttccgcgtgggtacgtataaatctgccgttgaaccgtttattcgtgatgatatgagtccggcagcccgcgaagctgacagccgctggattggtgagctgtggcaaaactatctgaatactgttgccgctaaccggcagatccctgctgagcaggtattccctggcgcgcaagggttgcttgagggtttaaccaaaaccggtggcgataccgcgaaatatgcactggaaaacaagctggtcgatgcactggcaagcagtgcggaaatcgaaaaagcactgaccaaagaattcggctggagtaagactgataaaaattatcgcgccatcagttattacgattacgcattgaaaacgccggcagataccggtgacagcatcggtgtcgtctttgctaatggcgcaattatggatggcgaggaaactcaggggaatgttggcggtgataccactgcggcacaaatccgcgacgctcgccttgacccgaaagtgaaagcgattgtcctgcgtgttaatagcccaggcggcagcgttaccgcgtctgaagtgattcgcgctgaactggcagcagcccgggcagcgggtaagcctgtggttgtaagcatgggcggcatggcggcatctggtggttactggatttccacgccagctaattacattgtggctaaccccagcaccctgaccggttctatcggtatcttcggcgtgatcaccaccgtagaaaatagtctggatagcattggtgttcatactgatggtgtcagtactagtccgctggcggatgtttctatcaccagggcactgccgccggaagcgcagctgatgatgcagttaagcattgagaatggctataaacgctttatcacgctggttgctgatgcgcgtcatagcacgccggagcagattgataaaattgcccagggccacgtctggaccggtcaggatgcaaaagctaacgggctggtcgatagtctcggggatttcgatgatgcggtcgccaaagcagcagagctggcaaaagtgaaacagtggcatctggaatattacgttgatgaaccgaccttcttcgacaaagtgatggacaacatgtctggttctgtccgggcaatgttgccagatgcgttccaggccatgttacctgcaccgctggccagcgtagcctctaccgttaaaagtgaaagtgacaagctggccgcgtttaatgacccacaaaaccgttatgcgttttgcctgacctgcgccaacatgcgttaagtcttgtactgagtggccgacagatcgtcggccacattattttttacgtcgacgaatcctcttcccgctgtttcgccccatatttccttatccgcatagtatcaggtgcgctccccctgcctcacgtatatacttttgctctttcgatatcattcatatcaatatcatgcaaaagaaaagtatttacgttgcctacacgggcgggaccatcgggatgcagcgttccgagcagggttatataccggtgagtggtcatctacaacgccaactggcgctgatgccggaattccatcgcccggagatgccagatttcaccattcatgaatatacgccgctgatggattctagtgatatgacgccggaagactggcagcatattgctgaagatattaaagcgcactatgacgactatgatggttttgtcattctgcacggcaccgacacgatggcgtataccgcctctgcgctgagcttcatgctcgagaatctcggtaaaccggtcattgtgacagggagtcaaatcccgctggctgagttacgctctgacggacaaattaatctgctgaatgcgttgtacgttgcggcgaattatccgatcaacgaagtaacgctctttttcaataaccgattgtatcgcggcaaccgcactaccaaagcccatgccgatggttttgatgcgtttgcctctccaaaccttcctccgttactggaagcaggtatccatattcgtcgtttgaatacgccacccgccccgcacggtgaaggggaattaatcgttcatccaatcaccccacaaccaattggcgtagtgacgatttatccagggatttctgctgacgtcgtgcgcaattttctgcgccaaccggtgaaagcattgattctgcgctcctatggcgtgggtaatgcgccacaaaacaaagccttcctgcaggaattacaagaagccagcgatcgcggtattgtggtggtcaacctgacacaatgtatgtccggtaaagtgaacatgggtggttatgccaccggtaacgccctcgcccatgccggcgtaattggcggtgcagatatgactgtagaagccacgctaaccaaactgcattacctgcttagccaggaactggatactgaaaccattcgcaaggccatgagccaaaacctgcgcggcgaactgacgccggatgattaaggagactgtaatgccccctcgcgccctgttactggtcgatttacaaaatgatttctgtgctggtggcgcgctcgccgtgccggaaggtgacagtacggtggatgtcgctaaccgcctgattgactggtgccagagccgcggtgaagcggttatcgccagtcaggactggcacccggcgaatcacggcagttttgccagtcagcacggtgtagagccttatacgccaggccaactcgacggtttgccacaaaccttctggccagatcactgtgtgcagaacagtgaaggcgcacaattacatccgttactgcaccaaaaagcgatcgcagcggtgttccataaaggcgaaaatcctttagttgacagttacagtgccttttttgataacggccgtcggcagaaaacctctctcgatgactggttacgcgatcatgaaatcgatgaattgatcgttatgggcctggctactgactattgcgtgaagtttaccgtgctggacgcgttacagttaggttataaggtaaacgtgattaccgatggttgtcgtggcgtgaatatccagccccaggacagtgcgcacgcgtttatggagatgagtgcagctggggcaacgctatatacgctggcagactgggaagagacacaggggtaattttacgctggcctacaattctgtactggcattgtaggccaaataaaacacgtcagtggcacatctggcaattgatgccatcaacgaaagatttaattcacctcagaaatctcttccaagctcaccttccgcgtttcgatgccaaaaatggagagaaccagcgcacagagcaataacataacaccaagtaccataaacaccgtgatgctcccataatgtgttaataatgccgcaacgccatagggcgtgaagactgcgacgatccgtccgacggcattaacgaaaccgctaccgcgcaggcgtaaatgcgttggccaaagctccgggatataaaccgcgctcgcgaagcaaacatacatgtataaaaagaagatcatcaccagtccatagattaaaatcgcccactctgtagtctgaatactatagatatagcctaacacggcaataataataagtaaggtggagccaaataaccgacgaggaaaatgatcaataattaatgccgcaataaatattcctaccggagcgccaatcataataacagcggtcattaatatacttttatcgacatcaatgccggagttaacaaatatggtcggtatccatacggtgatggtataaaggctaatgttcattgcaattaaaacagtaatcgcgactaatgtacgtcgtaacatttcacctttaaacaggagccagaaagtacccttgattactttaaccttgctgttgctctgatagctagtaagcgggggtaaacgaatactcttctctctttcaatttgctgctctacttcacgaagttggcattctgcacctgcgatttgccctttccctgccagccatcgtgggctctcgataaagtatttaccactgagaaaccaggctaacagtatgccaataccacccagcagaaacattattcgccaactaaaaaaagcgataaccaccacgcctatcgccgcagacagcatggggctccagttaccaacaaaactgagccgcgcggaccattttccacgcaccgtcgcggggataaactccgtaaaactggcatagccaaccataatcagcgcccccattcctgttcccatcaggaagcgaaagaagatgagccagtacatatcagggacaaaagcggcccctgttgcagcaataccgacgatgagaagatttatgcgaaacgccctgcgccgcccaaagtagtcaccaataaacccaccagtaagactgccgatgaaataaccaaacattaatgcgctggtaaaggcggcattgaggaaattattactccatccattgcttaccagctttgctaagacgacattaccggagtaactcaaaaaccctgttaataacagactaaagcttataataccaaatatacgataatgaaaccgggccaaaggcaagcggtccagtcttgcgccaatttgatcatattgttccattaggtgcctcggatttgctaaaaaggtagcaattgcggcaaattcacttgccgcatctttatcatcattttatttcaaggcgcaggaacaaataatattgacaacgtgtgcttaaattaccacaccagctggatattattgtctttgcaaaatgctatccactctgcacccggacttttatcagttattatgtaattaatatgactaaaatcagctaactggacaaaagctttgcgatcaaacttagagtgatcaaccaataacgcaacttctgtcgcctgacggatcattgtctttttgatttcagcttccgcttcattagagtccagcgcgccgctgttaatatcaagacctttacaactcattaccatgatatcgacatgatagcgcctgatgatctctttagtaattcttccttgcagactaagtgtatttttgtttagttccccacccgtactaacgactttaatttcactctgagccagaacatgaatcgcttccgcgctgttggttagcaacgtcaggccactacggtcctgtaacaatttgagcaattccattacggtactactggaatcggctgccatggtggttttattgtcgataaagggtagtgccttgcgtgcaataagctgcttctcttcataaaagctactagcgcgcttataaaaatggatattctccgtcaacatcgctgtatttaaaacagcaccaccataggttctggtcaaaaagccttcatcttccagcttctcaagatcgcggcgaatggtttcttcggttacctgaaaaatcccactcaaattactgactgtcacctttttatcgttggcaaccatttgcttaattgcctgaatcctgtcttttgccgccacgattacacccctgtatctttttacatcacattagcgcgattatcgcataaccgatgtttactttcaaaataacctgtttgaatcacagattttcatcacagttttcacagaaacagaggtgaatcgtgttgagtatttaacgctccagggcctctgccatttccctcatcaatgttgcgtctgcatcgcttaagttgatattcagtgccgcgacattttcgcgtacctgttccggtgcagtagccccactaagaatggagattaaatcactctgttttaatatccacgccagtgccagagtgggaattgtgcactgataacgagcacaaagtggctgccactgttcaagcatatcaatcactttcagcatgttttcacgctggaaccagactttatttgcccgagcgccgcccggaacgtaatcacgagtgatggtgccggtcaacaatccctgctctagcggggaataaacctgaaccacaatgccattatcacgacatagtggcagcagttcgttttccattgcccggtcgaggatactgtatttcgcctgaataatatccagttcaccatattgcagatactcgcggatatggtcagcatcgacgttagcagcgcctatagcgcgaattttcccttcagactttaactcattaagcactgcgacagtttcagcgatcggcgtaaaaaatggcggcacgctctgccagtgcgtcatgtagatatcgatgtaatcaatacccagacgttgcaagctcgctgctacctcttcgcggatagattccggggaaaggtttttatacaactgccgatcgccaactttgttgaataaacttccttttcgttcccagacaatgccgcatttggtttctactacaacctgttcacggggcagtttttttaacgcctgaccgacgataacttcactattgccaaagttatatcctggcgcagtatcaatcagattaatgccacaacgatgggcttcaagaatcgtatcaatacatatttgccgatcgagatcgccattccatgcaggaccgccgccaatggcccatgtccccaaccccattcggctaagcgtaatatccgttgtgcctaaaggtatctttttcatttgccttcattatccttcgtattcttccagcaattgttcgaccagctttctgttttttacgccggtggtggcaccgacgcttagaacgctgatagccgccgttgcattggcaaagcgtgcgcattcacgcagatttttgccttctaacagtgccgcaataaaaccactagcaaagttatcgcccgcgccaatggtgtcgatggcggttattcctgcgaccgccggcaccttcatcgtcatgtcaccacgcttgataaagcagccgtctttacccgttttaatcaccaccgtttttacgccgcacgcaagaaagcagtcagcaatttcatccagtgtctctttcccggtgagtaattttgcctcggcaaaattaggaaacagataatcgacataactcaatgcttcgcaaatatcatccagcgtttcattcaaccgcggtttgatcatatcggcacagataatcatctgccgggctttagcttgcgtaaaaatttctgttagcgctttaccatccaatagtggactgttgaaaatactggccagacttaataatttcgcctgagaaaaccgcgcaaaatcaacatcgtcaatattcaatttccacagactgccattacggtttgtgacaaacgtccgctcgccatcctccgtcaccagtccaacgttaatagaggtatctatgctgacgtcctgcttcaggctttgaatatcaatattctctttgcggcaatggtcgagaataaattgccctgcggcatctttaccaatacgactcattaatgctgtgcgatggcccagacgagaaataattgttgcttcatttattgcatcacccccggtggtcattgcgattctttcaagaggataagaatccacatcaaagatatttttactgaccggttgcaatggaatatcaacaatagcggcacctatacaaataacgtcgagattatccatatcattattccgctttgccatcagaaccgaacagtttaattttttccaatgcccgttcttttacagctttacgtacttcacgttctaaatgcaggaaaggctgatcctggttttctttcactgcaaccattgcggcctgacagagctccgtatgaatgttgattttcgcgatacccaagctaattgcagttttaatgtcggcatcactgatcccgcttgcaccgtgcaaaaccagcggaacagaaacggcatcgcgtacgcgtttgacgacctcaaagttcaattgtggctcactcgtataaaccccatgctggttgccgatggcgacagccaaactatcacagcccgtacgttcaacaaattcagccgcctggtcaggatcggtatagtgatagcccgccagcgcttcctcataaacggtttcattaccgacatgccctaattccgcctctaccggaatacccagcggatggaagaaatcgacagcctctttggttaaacgaatattttcttcgaaatcaaacgcggaagcatcacgcattaaactattcataccatgagtccaggcgttatgaataatctccatactccgaccatgatcccaatgagttattaccggcaccgttgctttttgtgccatacttaccatcatgtgagagaaatcttcaaaactggtgttaccgacaaaacctgtaccaaaagaaataataaccggggatttcgcttcttcggctgcgtcgataacgcccatcaacatttctgcattccatacgttaaaatgggcaattgcataatgtttatttgtggcatcgttttcccaatatctgatatctgcgagcatgttctgttctcccgtattaattaatcgctaattttaataacgcctttaataatgtcgcgtttgttgttaacactctcttcaaatgcctgttgtacatcccgataatcgtaaatatgcgtcaccatgcttttcacatcgaatcgcccactagaaatagcttcaatcgtgaccggataacgattggcatagcggaataccgtctggatagtgacttcgcgattgattttgaggaaattgattgcgctatcgccgggtacagtaccaacaatcataattttaccgccgcgcattaccagataaggtgcctgtttaacggtgaccgcagaacccgctgtttcgaaaacaatatctgcgcccatgtcttcggtaaattgctgacagcgtgcaatagtgtcttcttttgcgccgttaataaccactgtcgcaccaagctgttccgccattgccagacgtttttccagcacatcaacgacggcaatttccgttgctcccaggcatttgcacgcttgcaacgtcatcaaaccaatacaacctgctcccagaataattatcttcttacccggtttaacatctgccagcatcgcggcatgcatcccgactgcggcaggctccaccagcgccccttccatcgtgtccatattgtcgggcagtttgtaagtaaagctctccggatgacacagatagtgcgttaatgcgccgcggtagttgggttgtgtcgccataaaatcaacgtccgggcagatgttatatttgccttccagacagtaacgacagtgaccgcaaggaacgccaggttcgatatttacccgatcccccggtttaaatttgcgcacgcggcttcccacagccacaaccgtcccggcgcattcatgacccaggccaatttcttgatttgggtctttaggcggaataaacgggccactttcaaaaccatgtacatcactaccacaaataccgacatattctactttaatcaaaacttcatcttctttaggcactggtatttctgcactaataattttcattgtgcccggcacctgcaatattgctttactatttttcattttgaatccacccgtattatttattggctactgcatcaatacttaaactttcaacggagacacctttggtttcgattccaatggtggcgatagcaattgcgacaataatactaaccgcccccagaagaataaagactcccgtaacgccataactactgagcagcactgcaacggcataaggtgcggcaataccactgattcgccctaccgcattcgccagaccggagccacggagtttggcctctgtcggccagatttcagggacatacactgcgctggcatagcaagcgtacatatagacgaaagtaatcaggaagaaaccaatcaacgttatgagcaacatactggtttgcagactatagatatatccgagcaccgcaatcaggattaatagccccacacccattgttttacgcggaattttatccatcaccagcatggcaataaaaataccaaatggcgcgccaaacatactcatggtatttaaaacaatgctgtcttttaaattaatcccctgggtcatgaatattgttggcaaccagttaattagtgtgtactgcacaacgttcatggcaatcagcacacaagagcctaatatcacgcgtttcagtaatactcctgtcagtaaggcactatacggcaccgcttgtggcgctttaccgtcatcagcaataaccacaggcggcaaaggtttacccgtctggcgtatgacgccttcttctatactccgcatgactttctcggcttcctgataccgtccgcggctttccagccagcgcggggattcaggaaagtagcgccaggccagcgccgtagcgataaggctcaatattgcagggataagcagttgtacccgccagttccactctgcactaatcagcggcgtgagtcccatcgctatcaaactacagagcggataactccagttgccaataaaggaaacccgactactccacgttccacgatttctaccgggcatatattcggtgaaaccagcaaacagcgtaaccagtaaagctcccagcccaactcccatcacaaaacggcaggcaataaggaaatccatattcggactgaaagcaccgacaaccatgctggcaatatgaatggcctcatagaggatgaacgcatttctgcgaccggttttgtcgccaatgatgccgcccaccagcgcaccgagaaacattccggcggtcgtgattgcactgaatgtggctgtggtggaattatctgtccagcccaacgctttcagctgcgcgaggatcaagccaccaacggcattactccagcagacaagcaagccaaacgcgacgatggcaaacatactactatgccagcggcaatccggtaagcgatccagccgtgcaccacaatgcggttttgttatctgttccatgcgataacgttccttcaggagagtggttattcatcaaagtcgtaagtcatgatcactttgattgcggttttatcgaccatcgcatcaaacccttcgcgccattggctcaggccgatacgatgcgtgatcatcggtttgactttgatagcgccgctggctaatagcctgatagcgttacgccaactggtggagtcataggccatatgcccaatgatgcttttgttccaggcggtaatgtcattaatgctgaaatcaagaggtttgaagcccattccaacgcgtaccacttccccgttcgggcggagcatttcgatggcttgtttcagtgcgatattggcaccggagcattcaatcaccagtcccagattgtctttgccacaaatttgctggcagcgcgccaccacatcttcggtagaaccatttactactgccgtcgcacccagttcttttgcaaccgggaagcggaccgccacatcttcttgcagaccaacgacgacgatatttaccgcccccataattcgcgccatttgtacggagaacagcccgagtgggccagtgccgatgacgaccacatcctgaccaggaaggaatttgctttgctgcgcgatggatttgtaggcattacagatagggtcaagtacggctgcgtcctcataatcaacaccatcagggatttcccacaacgcatgacgatgaattttgagaatttcaccaggaaccagacaatatttggaaaaaccaccgccccaggtattattatccagaccaaggtttactttttctgtacaacacagaaaatcaccttgttcacaggccggacaaacaccgcaaacgtgaccgctgttatcgcttacgacgcgttgccccactttccagtctttgactttttcaccaacctgcgcaatacaacctgcgaactcatggccgcggatagagttaaactcatcagaaccgctatcgacattgtagtgcttcatgtctgcgccgcagattgccgcggctttaatttcaatcactacatcttccgggccacacatgggttgtgggacatcaatcatcttgtagccgccaaaggccttgccaaaccgagccagtgctttcattgcgtcatcctctgtgtttagttttgcttagatggccatcatacttacccacatgatttttgaggtcaacattaaatctgtaaaacacagataatgatctgcgttttacaactcagatcacaattacgcagaaaatggctgggtctgttacaggttgatggaaggcggggcgcaaaaagagcaaattcgagagggattaccggccaaataggtctgagacttaagttcaggagaagtcattcaggtgtgaacgggacggcaagagatcggactgggacttagccaggtcatggcgagataattgagatgagtcgtggggtcattgttggctatccccttcatagccgaggcaaaaaggggatgaaccacttacttaaacatggcaataggctttgcactgataccaaaatcttcttttaactgctgtttgctcttcatgaccatctgaccatttgtgtcaattgtcatatgctgtgcttcgatattatggcgggcttgccacagcatcaccagttgcaggcagttctctttttgttcctcggtcaacgcaacgccatcaggccatttccccagttcaacggcggtgctcaaacgctggtatacctcaggcatcatgctgttgataatgtcatcaagattcataatttttccgctcctgtggaataagttgctgaatcgttttttcaaccgttgatttcttcgccgttttcgccatcggtaaagcgtaaagaggcagagttaacacaataacgttcgcccgttggctgcggcccgtcggggaagacatgccccagatgggcatcacagttaccgcaacgaatttctatgcgctgcattccatgactcaagtctttgatataacgaatggattcttcacttaccggttcgtagaaactgggccagccacagccggaatcatacttggtttgggaatgaaacagcggggcatcgcagatcaaacagtgatatacgccgtcacgcttgttatgcagtaaacgacccgtaaatggcggctctgtcccatgattctgcgtcacgtaaaactgcatctcggacaaattttttttcagttcttctgcgctaggtttattagccatttgctcacatctcactttaatcgtgctcacattacgtgactgattctaacaaaacattaacaccaactggcaaaattttgtcctaaacttgatctcgacgaaatggctgcacctaaatcgtgatgaaaatcacatttttatcgtaattgccctttaaaattcggggcgccgaccccatgtggtctcaagcccaaaggaagagtgaggcgagtcagtcgcgtaatgcttaggcacaggattgatttgtcgcaatgattgacacgattccgcttgacgctgcgtaaggtttttgtaattttacaggcaaccttttattcactaacaaatagctggtggaatatatgactatcaaagtaggtatcaacggttttggccgtatcggtcgcattgttttccgtgctgctcagaaacgttctgacatcgagatcgttgcaatcaacgacctgttagacgctgattacatggcatacatgctgaaatatgactccactcacggccgtttcgacggtaccgttgaagtgaaagacggtcatctgatcgttaacggtaaaaaaatccgtgttaccgctgaacgtgatccggctaacctgaaatgggacgaagttggtgttgacgttgtcgctgaagcaactggtctgttcctgactgacgaaactgctcgtaaacacatcaccgctggtgcgaagaaagtggttatgactggtccgtctaaagacaacactccgatgttcgttaaaggcgctaacttcgacaaatatgctggccaggacatcgtttccaacgcttcctgcaccaccaactgcctggctccgctggctaaagttatcaacgataacttcggcatcatcgaaggtctgatgaccaccgttcacgctactaccgctactcagaaaaccgttgatggcccgtctcacaaagactggcgcggcggccgcggcgcttcccagaacatcatcccgtcctctaccggtgctgctaaagctgtaggtaaagtactgccagaactgaatggcaaactgactggtatggcgttccgcgttccgaccccgaacgtatctgtagttgacctgaccgttcgtctggaaaaagctgcaacttacgagcagatcaaagctgccgttaaagctgctgctgaaggcgaaatgaaaggcgttctgggctacaccgaagatgacgtagtatctaccgatttcaacggcgaagtttgcacttccgtgttcgatgctaaagctggtatcgctctgaacgacaacttcgtgaaactggtatcctggtacgacaacgaaaccggttactccaacaaagttctggacctgatcgctcacatctccaaataagttgagatgacactgtgatctaaaaagagcgacttcggtcgctcttttttttacctgataaaatgaagttaaaggactgcgtcatgattaagaaaatttttgcccttccggtcatcgaacaaatctcccctgtcctctcccgtcgtaaactggatgaactggacctcattgtggtcgatcatccccaggtaaaagcctcttttgcattacagggcgcacaccttctcagctggaaacctgcgggtgaagaagaagttctgtggttgagcaacaacacaccgttcaaaaatggcgtcgctattcgcggtggcgtaccggtttgctggccgtggtttggtccggcggcacaacaaggtctgcctgcgcacggttttgcccgcaacctgccgtggacgctgaaaagtcatcatgaagatgctgatggcgtagcgctgacttttgaattgacgcaaagcgaagagacgaaaaaattctggccgcacgactttacgctgttagcgcatttccgcgtgggtaaaacttgtgaaatcgatcttgaaagtcatggcgaatttgaaaccacctctgccctgcatacctactttaacgtgggtgatatcgctaaggtaagcgtcagtgggctgggcgatcgcttcattgataaagtgaatgacgcgaaagaaaatgtactgaccgatggtattcagaccttccctgaccgtaccgatcgcgtgtatctgaatccacaagattgcagcgtgattaatgatgaagcgctgaatcgtattatcgccgtaggccaccagcatcatctgaacgttgtcggctggaacccgggaccggcgcttagtattagcatgggcgatatgccggatgatggctacaaaacatttgtttgtgtagaaacggcttacgctagtgaaacgcaaaaagtgaccaaagagaaacctgcacatctggcgcaatccattcgcgttgcgaaacgttaatttacgttaatgttgtgtgccgggtgcaatgcatccggcacacaacatcacaccatatccagcgcagtttttccttttggtgccggatatgccttatccagcatagctaattccgcactagaaagttcgacctcaagcacagccgcattttgttggacatgggcaatcgtggccgcttttggaatcgccatcacaccctgatgactgatcacccacgccaacaatacttgtgccgcgctgatattgtgagcatgtgcaatttcgttgactaccgcgttttttaacagtccattgcgcaaccgcccggcctgggctaacggactgtaagccatcaccggcatctgctgttgctggcaccaggggagtagatcgtactcaattcctcgactaccgagatggtaaagcacctgattagtggcacactgatttccccccggcagctgccagagttcctgcatatcagcataatcaaggttagaaacgccccagcggcggatttttccctgggcgatcaatttttccatcgctgcgacagtctcttcaaaagcgaaactgccagaccagtgtaataagtaaagatcgagataatcagtattgagacggcgtaaactggcttcgcatgcatttatcgctttttgcccgccagcattccacggatagactttagagacgagaaagaccttctctcgcagaccggttaatgcttccccaaccaccttttcggcaccgccatcggcatacatttcggcggtatcaatgagggttaaaccgagttcaatgcccgcgcgtagtgcagcaacttctgttttgcgctgactggcatcttcgcccatataccatgttccctgccctacggctggcagactgacatcgccactaaattgaatcattttttgttgcattgtttcctcccaggtattgcaccaccgtaatgcaaaacagggcgtgacgccctgtttttatgcacaaaatgccctggaaagatgcattatcagaatttgtaggtgatcccggtagaaatcaggccagtccaggatttatccaccatcgggctgtcagtaacttcatcagacagacgggtgtagcgtgcggtaccgtaaacactccagtcgccgaggaagttgtagctggcgctcagctccaggtaagggctccagctgtcgttcgggttatagccacgcagaccgctgcgagcggactctttgcggcttacgccataatagtattcgttctggttttcgctgttccactgcacaccaatacccggagtcacggtcaggccaccgttggtgtaacgatacaaccaggccatatcccagacgatgccgttgctgttatccagggtatcgccagccagggtggtacgcaggtaaccgtactgggtaaagtgagcataagacagaccagccatcatggtgctcttacggtcatccaggtgacgcatttggtgatcgccactgtctttcgctttgaagtaaagcgggctccagtaagcggtaatactaagtttatccgttgcgtcattccacaggtagtaaccaccacctaagccacggaaccagaagttatcgccttcatagttgattaccggtactgggtaaacatcggtatcgtaatctttatatgggtgttcaacgacacctacgcctgcgcccagggaaaatttaccttcagcgtgcgctacgcctgcagacgttgcgataagcactccaagtgccagaagtttgagtttggtcacaattaatcattccttaaacaaatgtttagcgggcgacaaagtttacccgtcaatacatcgaaacccaacctttttacgttttcattttttaaagtaactgtttaattttcctgacgcggatgacaccgcgcttacagccaaatgaatttagcgttactggcgagcctggtctttacattaattatgcaaaatttatggatgagttgttgatatgccattgaaattaagaaagccgtgcaggcaagttttccatttgccatctacgcttaattttgaaggtgtatcaccgggcacgttgttctcatcgtcgataaaatggcatgagagttgctgtgttttagcaagagacgtcgttcagtttacctcttccgggagcctctactattcatatgaacggctcttaacctgtgctaaaaaacgaaaggacggcataccatgaatatattcgatcactatcgccagcgatatgaagctgccaaggacgaagagttcacactgcaggagtttcttaccacttgtcggcaagatcgcagtgcttatgccaacgcggctgagcggctattgatggctatcggtgagcctgtcatggtcgatacagcccaggaacccagactttctcgactcttttctaaccgggtcattgcacgttatccggcgtttgaagagttttacggcatggaagacgcgattgaacagattgtctcttatctgaaacacgcggctcaggggctggaagagaagaaacaaatcctgtatctgctggggcctgtgggtgggggtaaaagtagccttgctgagcgactgaaaagtttaatgcagctcgtaccgatttatgtattgagcgcgaacggtgagcgtagcccggtcaacgatcatccgttctgtcttttcaatccgcaggaagatgcgcagattctggaaaaagagtatggcattcctcgccgttatctcggcaccatcatgagcccgtgggcggcaaaacgcctgcatgaatttggtggcgatatcactaagttccgggtagtgaaggtctggccgagtattctgcaacaaattgctatcgccaaaacggaacccggcgatgagaacaaccaggacatctccgcgctggttgggaaagtcgatattcgtaaactcgaacactacgcgcagaatgacccggacgcctacggctattccggtgcgctgtgccgcgccaatcaggggatcatggaattcgttgagatgtttaaagcaccgattaaagtgctgcatcccttgttaaccgccactcaggaaggtaactacaacgggacggaaggtatctccgccctgccgttcaacgggattattctcgcacacagcaacgagtccgaatgggtcactttccgtaataacaaaaacaacgaagccttcctcgatcgtgtttacatcgtgaaggtgccgtattgcttgcgcatttccgaagagatcaaaatctacgagaaattgcttaatcacagtgaattgactcacgccccatgcgcccctggcacgctcgaaacactgagtcgtttttccattcttagccgcctgaaagagccagaaaactccagcatttatagtaagatgcgggtttatgatggcgaaagtctgaaagacaccgatcccaaagccaagagctatcaggaatatcgtgactacgccggtgtcgatgaagggatgaacggtctgagcacgcgttttgcgtttaagatcctctcccgcgtgttcaacttcgatcatgtagaagtggcagcaaacccggtccatctgttctacgtcctggaacagcagattgagcgcgagcagttcccacaagagcaggcagaacgctatctggagttcctgaaaggttatctgatcccgaaatatgccgagtttatcggcaaagagatccagacggcctaccttgaatcctattccgaatatgggcaaaacattttcgaccgttatgttacctacgcggatttctggattcaggatcaggagtatcgcgatccggataccgggcagctgtttgaccgcgagtctcttaacgccgagctggagaaaatcgagaaaccggcggggatcagtaatccaaaagatttccgcaacgagattgttaacttcgtactgcgcgccagagcgaataacagcggacgcaatccgaactggaccagctatgaaaaactgcgcacggtcatcgagaagaaaatgttctccaataccgaggagctgttgccggttatcagctttaacgccaaaacgagtaccgacgagcagaagaaacacgacgactttgtcgaccgtatgatggaaaaaggctacacccgtaaacaggtgcgtttactgtgcgaatggtatttgcgcgtacgtaaaagctcttaacaaccctggcccggtacacatgttaccgggcctacaacgacagcgaaccgtgggcctgagaagcggcaacacaggcgtagcatacagttggcaaatgtagtacggggggcatatgacctggtttattgaccggcgtctgaacggcaaaaacaaaagcatggtgaatcgccagcgttttttacgccgttataaagcgcaaattaaacagagcatctccgaggccattaataagcgtagcgtgactgacgtcgacagcggcgaatccgtatccattcccacggaagatattagcgaaccgatgtttcatcaggggcgtggcggtctgcgccaccgcgtgcatccgggcaatgaccatttcgtccagaacgaccgaattgaacgtccccagggtggcggcggaggttccggcagtggtcagggccaggccagccaggatggtaaaggtcaggatgaatttgtctttcagattagcaaagatgagtatcttgatctgctctttgaagatttggccttaccgaatctgaaacaaaaccaacaacgccagctgaccgaatataaaacgcatcgggcgggttataccgctaacggcgttccggccaatatcagcgttgtgcgtagtttgcagaacagtctggcgcgacgcacagccatgacggcaggcaagcggcgggaacttcatgcactggaagagaatttggccatcatcagcaacagtgaacctgcgcaactgctggaagaggaacgtctgcgcaaagaaattgcagaattacgtgccaaaattgaacgcgtcccttttattgacaccttcgatttacgttacaagaactacgagaagcggcccgatccctccagccaggcagtgatgttttgcctgatggacgtttccggtagtatggatcaatccactaaagatatggctaagcgtttttatattctgctgtatctgttcctcagcagaacgtataagaacgtggaagtcgtatacatccgccatcatacccaggcgaaagaagtcgatgaacatgagtttttctacagccaggaaacaggcggcaccattgtttccagcgccctgaaactgatggatgaggtagtgaaagagcgttataacccggcacagtggaatatttacgctgcacaagcaagcgacggcgataactgggccgatgactctccgctttgccatgaaatcctggcgaaaaaattattacctgttgttcgttattacagctatatcgaaattacccgtcgtgcacatcagacattgtggcgagaatatgagcatctgcaatctactttcgacaactttgcgatgcagcacatccgcgaccaggatgatatttatccggtgttccgtgaactgtttcataaacaaaatgcaacagctaaaggctaaaactatcagccaggtcattatcgcctggctgatttttagcttactgtaaattatctcatttattacatacattagcttacaatcgctttaaatatgacagcataacctttacataatttagttccagaaaacaatcattcggaaaaatgattcagagtacacgtatttccatggggttattctttaaatattttttaagcttaacgaaaattgatcctggtcaaaactatatatctctgccaagtataaaatccagcactcacattgctctcctttttatggtttctatgggtacacaaaaattaaaagctcaaagcttttttattttcagtttattgctgacgttaattttattttgcattactaccttatataacgaaaacacaaatgtaaaactcatcccacagatgaattacctgatggttgttgtggctttgtttttccttaacgccgtcatttttcttttcatgttaatgaaatatttcactaacaaacaaattttaccaacactcattttaagccttgcatttttaagtggccttatctatttagttgaaaccattgtaattatccataaaccaattaacggcagtacactgatccagacaaagagcaatgatgtttctattttctatattttccgccaactcagttttatttgtttaaccagcctggcgctcttttgttatggaaaagacaacatccttgacaacaataagaaaaaaacgggaatcctgttgctggcgctgatcccttttttagtttttccccttctggcacacaatctgagcagttataacgctgactattctttgtatgtcgtcgattactgtccggacaaccatactgcgacctggggaatcaactatacaaaaatattggtttgtctgtgggcatttttactgttctttattatcatgcgcacacgattagccagcgaactatggccgttaatagcattattatgtctggcaagcctatgctgcaacttacttctactgactctggatgagtataattatactatctggtatatcagtcgcgggattgaagtttccagtaaactgtttgttgtgtcttttctgatttataacattttcaggagctgcaactctccagcaaactggcagttcatgatgtgctgaccaatatttataatcggcgctactttttcaacagcgtagagagtttattgagccgacctgttgttaaggacttctgtgtcatgctggttgatattaatcagttcaaacgcatcaatgcccaatggggacatcgtgtgggtgataaagtgctggttagtattgtcgatattatccagcaaagcatccgccccgatgatattttagcgcgactggagggtgaggtgtttggcttgctatttaccgaactcaatagtgcccaggcaaaaatcattgcggaacgtatgcgtaaaaatgtcgaactcctgaccggctttagtaacagatatgatgttcctgaacaaatgaccatcagtattggcacggtttttagtacgggtgacacgcgtaatatcagccttgtcatgacggaagcagataaagccttacgcgaagcgaaaagcgaggggggcaacaaagtgattattcatcatatttaagtgcaaaaatattcagagccatgctttttgcgtggcttttgcatacaatttattactattacccctaaatttcccctccccagcggcgcagagatgagtataattagcgcccctgtgccaggccgcaatcgaactttatctggttttctcgtttcactaaccgaaggagatgcgtataaagcttccgatgagcgtttatatgtcaataagcagaacaaaaacagccgttcatgataaccttctgtggttgtttgcttgtaatctcaggagcgtgaaatgactgaaatggctaaaggaagcgtgacgcatcagcggttaatcgctttattaagtcaagaaggtgctgacttccgcgtcgttacccatgaagcggtaggtaaatgtgaagcggtgagtgaaattcgtggcaccgctctaggccagggtgctaaggcactggtatgtaaagtcaaaggcaatggcgtaaatcaacatgttctggcgatcctcgcagccgatcaacaggccgatctgagccaactcgccagccatataggcggattacgcgctagcttggccagcccggcggaagtcgatgaactcacaggctgtgtcttcggcgcgatcccccctttcagcttccatccaaaactcaaactggttgccgaccctctactcttcgaacgatttgatgaaatcgccttcaatgcaggcatgctggataaatccgttattttgaaaaccgcggattatttgcgcattgcgcaaccagaactggtcaatttccgccgcactgcgtaattagccggtccgttcgataagaagaacggacaaaaccagtacaacagcaatggcaaaaaagctactcgtgataatcagtgtctcgacaaacatttgatcgttcatagcatgcccccgggagatagctgttttcacgttattgttagcgtgcacaaatggcagtttgatgacagttcgcctgattttttatgcaaaaaacgtaaagattttctacttccttcctgcagcaagcgtaaagtaagcaggcttattattttttggcaaggaaaccacgatgtttgatgtcactttgctgatcctgctcgggttagctgcgctgggctttatcagtcataacaccactgtcgccgttagtattctggtgttaatcattgtccgcgtcacaccgttaagcaccttttttccgtggattgaaaaacaggggctaagtatcgggataatcattctgacgattggcgttatggcccccatcgccagcgggacgctaccgcccagtaccttgattcacagctttctgaactggaaaagtctggtggcgattgcagtaggcgtgattgtctcctggctgggtgggcgcggcgtgacgttaatgggcagccagccgcaactggtcgccgggctgctggtaggcactgttttaggcgtagcgctgtttcgcggcgtaccggttgggccgcttattgccgcgggtctggttagcctgattgtggggaaacagtaattattgccgcgggtctggtttcgcactttgtggggaaacagtagttaatctcgcaatatatcggcctggcgtttgccccaggcctttcttaaacatagtaataaaggccgttgtactatcataccccagcgtatgagcaactttctgtacagtatcgcctttcactaatccctgaagcgccataatcagctgtaactgctgacgccactggcgaaaactcaaccccgtctcttttactatcagtcgggcaagattgcgttcactcatcgcaaaaaagccagcccattgccccaatgccccccactcgacaggccctttcgccatcatctccaccatcgtgcggattttaggatgagaagaaacgggcaggtgcagctgttgttgtggctgctgagggagttcatcaaacaggacctgaattaatctgcgggtcattggctcagcacgctgagtcgtcgtcctgtttgccagggttaaaattaattcccggcataaggggcttattttcaatgtgcaacatgttgtcggcattgtcactgcgctgggttcgataaacagaaaacagagttcagcattagctgttacttgattgctatgttccaccccgcccggtatccaaaccgcatattgtggcggcaccatccacaaagcattttccaccgtacaggtaattgcaccatgtagcgccagtatcagctgtcctttgcggtgctgatgtacaggactggttaactcatccgttccggcgtgaatacaaaatgcgaccgcggcttcatggtgtcggtcgggttcatagccattgagattcaacctgtgcatcattttgtccgaacttagcgataatttgtcattttagcttgattcaacataacaataaaaacggtaaggtacagcctcgtttgtaacaatgagaagcatatgacctgtagtactagtttaagcggcaaaaacaggattgtccttatcgctggcattctgatgattgccacaacattacgcgtcacctttaccggcgcagcaccgttactggatacgattcgttccgcttacagcctgacgacagcgcaaaccggcttattgaccaccctgccattattggcctttgcgctaatcagtcctttggctgccccggtagcgcgacgttttggtatggaacgtagcctgtttgccgcgttacttttgatctgtgctggtatcgcaattcgctctctccctagcccttacttattatttggcggtacagcggtcattggcggtgggattgcattaggcaatgtcttactgccaggattaattaaacgcgatttccctcattccgtcgccagacttaccggcgcatattccctgacaatgggagctgcagcggcactgggaagcgctatggtcgtgccgctggctttgaacggttttggctggcaaggcgcgttgctcatgctgatgtgttttcctctgctggctctttttttatggctgccacagtggcgaagtcaacaacatgcaaatttgagtaccagccgcgccttacatactcggggtatctggcgtagtccgcttgcctggcaggtcacattgtttcttgggatcaacagtctggtctattacgtgattattggctggcttccggcgatcctcatcagtcacggctatagcgaagcacaggcgggtagtctgcatggtttgctgcaactagccacagcagcacccggtttgctgatcccacttttcttacatcatgtgaaagatcagcgtggtattgcagcgttcgttgccttgatgtgcgcagtgggcgcggttgggctctgctttatgccagcgcacgcgatcacctggactctgcttttcggttttggttccggcgcaacaatgatactggggttgacgttcattggtctgcgggctagttctgcgcatcaggcggcggcactcagcgggatggcacaatccgtcgggtatttgttggcagcctgtgggccgccgctgatgggtaaaatacacgatgctaacggtaactggtctgtaccacttatgggtgttgccatacttagtctactgatggcgattttcggactttgcgccgggagagacaaagaaattcgctaatatccggtgctatagtgacgtaacaaatcatgcgtgaaagggagaacaaacacgatgaatattcagtgcaaacgcgtttatgatccggctgaacagagcgatggttatcgcatactggtcgaccgcctctggccgcgcggtatcaaaaaaaccgatttagcccttgatgagtgggataaagaaatcacgccgagtacggaactgcgcaaagcctttcacggcgaagtcgtcgattatgcaacctttcgcgagcaatatcttgcagaactggcgcaacacgagcaagaaggaaagcggctggcggacatcgccaaaaaacagccgctgaccctgctctacagtgcaaaaaacaccacgcagaaccatgcgctggtgctggccgactggctacgtagcttgtgattttagtacagcatccggcggttatttttcaccagccggatggtcacgccgccacaatgcccattcatcaatcgtttcaccgcccggtaatttgcaattgttgctgaccccttgcgctgtctgcactggaatgagcgtcccgcccttctgctggcaatagacgctcgccggatttgccataccaatctgcggcggtttaggtgcttctggctgagaaggggtactacaaccagccaggaccagcaagcaaggcagaacaaaactgataattttcatttattgatctcacatatttatccaagattagagtatcgcggtatcgttttgttttgcagcactatttttattacattcactcaaaacatattacgtcttgtttcatctttgttgatgatgttttatcatgcctgcaaagattaaataatcagcatttacccgccgtatcctggagttgttccgtgagtgatcagattatcgcccgcgtcagccaatcccttgccaaagaacagagtctggaaagtctggtccgacagcttctggagatgctggaaatggtcactgatatggaaagtacctacctgaccaaagtggatgtcgaagcgcgcctgcagcatattatgtttgcccgtaacagccagaaaatgtacatcccggagaattttaccgtcagctgggattacagcttatgcaaacgcgccattgatgaaaactgctttttcagcgatgaagtccccgaccgttggggtgactgtattgcggcacgcaatcttggcatcaccacatttctgagcacgccaattcacttaccggatggaagtttctatggcacgctttgcgccgccagcagtgagaagcgccagtggagtgaacgcgcggaacaggttttacagttattcgccggactgattgcacaatatattcaaaaagaggcactggttgaacagctgcgcgaagccaatgctgcgctgattgcgcaaagctataccgacagcttaaccgggctaccgaatcggcgggcgatttttgaaaatctgacgacactgttttccctcgcccggcatcttaaccataagataatgatcgcgtttatcgatctggataacttcaaattaatcaatgatcgttttggtcataatagtggcgatctgtttctcattcaggttggcgagcgccttaatacgctccagcaaaatggcgaagttattggtcgtctcggcggtgatgagtttttagttgttagtctaaacaacgagaatgcggatattagcagcctgcgagaacgcattcagcagcaaatacgtggagaatatcacttaggtgatgttgatttgtattatcccggtgccagtcttggcatagtagaagtcgatcctgaaacaaccgatgcagacagtgccctgcatgctgccgatattgcgatgtatcaggagaaaaaacacaaacagaaaacaccttttgtcgcgcatccagcgctacattcctgaggcgtattcacatccttttgattggtgataacatgcgaatcggtattatttttccggttgtaatcttcattacagcggtcgtatttttagcatggttttttattggcggctatgctgccccgggagcataaagatgaaaaaaacaacgattattatgatgggtgtggcgattattgtcgtactcggcactgagctgggatggtggtaacgtcacctctaaaaaatagcaaaggctgcctgtgtgcagcctttgtgcaatttaagcgttaacttttaatcttcctgtagataaatagcacgacaatcgcaccaataacggcaaccacgaagctgccaaaattgaagccatcgactttaccaaagccaaacagcgtgctgatccatccgccgactacggcaccgactatccccagcaggatagtcataaagaatccacctccatctttacctggcatgatccacttcgccagaataccggcaataagcccaaaaataatccaactcagaatgcccattgtttcctcacttatctgttttgcattagcgggttagtcgctgataaaaagcatagcacaacatcgggagggcaagatttgtgacgagcatcacggaggttttttttgcgatggcgcagaaattgcgccatcaacgatcagtgataattaccaaccacaaacatcatgttcgttttccgtgtcataagaacgtacggtattcaccagatcttttatcacttcagccgccacttctggcaccagcaaagtcatcggcgtctctgtttcataatcgacagaaacgccattgctgttattggtgacggtcacggtatacgttgctttgcccatgattcatttcccgttatgaatgactttccgttgttgcgcaccttccatcaggacttcaggagccacgaagaagtcaatgttgaaataagtatcgtcagtcatggcttcaatgttgtgccacttttctggagggaacaccgcaaactgccccgcttcgataaggatcacctgatcaggctctgcactgtgttcatcagcgtagccgagatatttgaccgccccatgcataacggaaaggcgtgggtaaacccccgggcgcgttcctttatcaagatgacgttcgaatattccggcaggtgcagtttgtttattccagaaaggcgtactgcgcgtatgaatataattctgtgggatttgaagcatccttttccctccttcggtgaatgcgctgaaaacggtttattccagccgtttcagggtacgcctgataatttgcattttaaataccatttattggttactttttagcaccatatcagcgaagaatcagggaggattatagatgggaagcccgcgacaacgcgggctgaaagcatcaggattgcagcgtcgccagtcgggcagcgaaacccacgaacatcaaaccaatcagactgttgccaactttagccagtttctttttggtacgtatgtactgcgtgacaaaagcaccagatataatcaggaagctcaaatagcagaaactcaccagttccagcgtcgccgccagaataaagaaactaattcccgtatgtggggcattaacatcgataaactgtacgaaaaagctcacatagaacaaaatggctttcggattagtcaggctcaaaattaacgcgcgtttaaaaatagcaccgtattggggctcatcggatttggcctcgctatttttacccttcagggtcgcgtaaagaattttactccccagatagagcaaataaaacgcaccaagataacgtacaatgttgaataatatcggggtggtcttaattaatgtcgccactccagcccatgccagaaacatcaataccgcatcgccaataaatacaccgcaggccgcaagataaccgcctttcataccgctactgacgctatttttgagtacaaacagggtatttggccctggcaccaacacaataaaaatggccccaaccagataggtccagtaattcagaaccccgtattcagcgaacacattaacctctttaattatctttcgatcatgcgcgattaaaggtgaatatgctaaccaatctgtagcggcttagaaaggagaaaatcaggttttaacctgatatcaacccgataattgaatcattaatcaggcatgctccagactaaaattcgggtagtgctcggcaaaatactggcgtaaaaattctaccgttatccgcactttcgcactcgtcgccagcctactaacataaacggcccagacgttcgctggctggtaatattccggtagcacttgcactaaatgaccactggcaatgttttcgctaacatcccaccaggaacgcagagcaatcccctgcccatcgagacaccactgatggacaatttctccatgattagagctcagtgggccggtgactttaatcgcatgggggccttctttattgcgtaattgccagacaccaaaaggatgatcgcgctctttaatgaccaggcacggcaatgcagaaagatcggttaaatgtttcggcgcgccatgttgcgcaataaattccgggctcgcgcagagaatacggtaattggtcgccagtttgcgggcgattaaattaggggcgatgtcatcgccaatgcgaatatcgagatcgacaccttcattgaccaaatcgaccagtcggtcttccacatcaaaacgtaattccagttgcggatacgccttcgccagcgctaataacgccggagccaccacctgtcgtccaaaaccaaagctgctgataatacgcagcatcccctgcggcacctgacgcacgtcagaaagttcgtccatcatctgaccgacatcctgcaaaatccgctgcgcccattcataaatccgctctccttcttcggtaatggtgacgcggcgggtggtgcggtgtaacaacaccacgtttagcgtttgctccagcaaggcgatgcgcttgctgacgaacgccggactaacgcccagttcttccgccacggcggcaaaaccagcccggcgagccaccagcataaagacgcgcaaatcattcagcagcggtaaattattcatgattcgtgttttatgtttcaccagttacggggattaattccttttcagtcaattataggatggtgatgttgtcaattttgatggtcaggaagtgagaacccaatgatgaaaacgatgcgtattgctgcgatcccgggagacgggattggcaaagaagtccttcctgaagggattcgcgtgttacaggctgccgctgagcgctggggcttcgccttgagttttgagcaaatggagtgggcgagctgcgagtattacagccatcacggtaaaatgatgccggacgactggcatgagcaacttagccgtttcgacgccatctattttggtgccgtcggctggccggataccgttccggaccatattagcttgtggggtagcctgctgaaatttcgtcgtgaattcgaccagtacgtcaacctgcgcccggttcgtctctttcctggcgttccctgcccgctggcgggaaaacagcctggcgacatcgatttttacgtggtcagggaaaacaccgaaggcgaatattccagcctcggcggtagagtgaatgaaggtacagagcatgaagtcgtcattcaggaaagcgtatttacccgccgtggtgtcgatcgcattttgcgttatgccttcgaacttgcgcaaagccgtccacgtaagacactaacttctgccactaaaagcaacggtttagccatcagcatgccgtactgggatgagcgagtggaagcaatggccgagaattacccggagatccgctgggacaagcagcatattgatattctctgcgcgcgttttgtgatgcagccggaacgattcgatgtggtggtggcgtccaatttgtttggcgatatcctttccgatcttggcccggcctgcaccggcaccattggcattgccccatccgccaacctgaatccggaacgcactttcccgagcctcttcgagcctgtccacggttccgcgccggatatctacgggaaaaatattgctaaccctatcgccacgatttgggccggggcaatgatgctcgattttctcggcaatggcgatgagcgtttccagcaagcgcataacggtattctggcagcaattgaagaagtgattgctcacgggccgaaaacacctgatatgaaaggcaatgccaccacgccacaggttgccgacgcgatttgcaaaattattttgcgttaaggtcaaaccagtttatttgaaccgcgtcactgacgcggtttttttattcgttctttgcagtaaataacctgcgtcatttcaccttttattgtttccgtttcgtgttttatggctttccgtattcttaattgtttaatttatgtaacatgcaaattttgttacgcgtacgttaggttccgccgtacaggtattggttttgctggcaatgggactggtgatttatttagccaccagtaaatacggcaatattcgtcttggcgaaggaaaaccggaatacagcacgctctcctggctgtttatgtttatttgtgccggtttaggttcttctacgctttattggggggttgctgaatgggcctattattatcaaacacctggattaaatatcgcaccgcgtagtcaacaggcactcgaatttagcgttccctactctttcttccactggggcatcagcgcctgggcaacttatacgctggccagtttaatcatggcttatcactttcatgtgcggaaaaacaaaggtctgagcctttccggcattattgctgctattaccggcgttcgcccgcaaggcccatggggaaaactggtcgatttgatgttcctgatcgccactgtcggcgcactgaccatttcccttgttgttaccgcagcaacctttacccgtgggctttccgcgctgaccggtttacccgataacttcaccgtgcaggcatttgtgatcctgctttccggcggcattttttgcctaagcagctggattggtatcaacaacggtttgcaacgtctgagcaaaatggttggctggggcgcgttcctgctgccattactggtgctgattgtcggcccaaccgaatttattaccaacagcatcatcaatgccatcggcctgaccacgcaaaacttcctgcaaatgagcttattcaccgatccgcttggcgatggtagttttacccgcaactggaccgttttctactggctgtggtggatcagttacacccctggcgtagcaatgtttgtcacccgcgtttcccgcggtcgtaagattaaagaagttatctggggactgatcctcggcagcaccgtcggttgctggttcttctttggcgtaatggaaagctatgccattcatcagtttatcaatggcgtaatcaacgtcccacaggtgctggaaacactgggcggcgaaacagctgtacagcaagttctgatgagcttgccagccggtaaattgttcctcgccgcatacctgggcgtgatgattattttccttgccagccatatggatgcagtggcctacaccatggcggcgaccagtacgcgtaatctccaggaaggtgacgatcctgaccgtgggctgcgtcttttctggtgcgtggtgatcactctgatcccgctttccatcttgtttaccggtgctagcctggaaacgatgaaaaccaccgtcgtgctcacagcccttcccttcctcgtcattttactggtgaaagtcggcgggtttattcgctggctgaaacaggattacgccgacattccggctcatcaagttgaacattatctcccgcagacaccggttgaagccctggaaaaaacgccagtgctccctgcgggaaccgtattcaaaggcgacaactgagcgccatcatcctaacgataaaggtatccctatgagcaatctgagccctgactttgtactacccgaaaatttttgcgctaacccgcaagaggcgtggaccattcctgcccgtttttataccgatcagaacgcgtttgaacacgaaaaagagaacgtcttcgccaaaagctggatttgcgtcgctcacagcagcgaactggcgaatgccaatgattatgtgacgcgtgagatcattggcgaaagcatcgtgctggtacgcggtcgtgataaggttttgcgcgcgttctataacgtgtgtccgcaccgtggtcatcagttgttgagcggtgaaggaaaagcaaaaaatgtgattacctgcccgtatcacgcatgggcattcaaactcgatggcaacctggcccatgcacgtaactgcgaaaacgtcgccaatttcgatagcgacaaagcgcaactggttccggtgcgtctggaagaatatgccggattcgtcttcatcaacatggaccccaacgccaccagcgtagaagatcaattacccggcctgggcgcgaaagtgctggaagcctgcccggaagtccacgatctgaaactggcggcccgctttaccacccgcacgcctgccaactggaagaacattgtcgataactatctcgagtgctatcactgtggtccggcgcatccaggtttctccgactccgtacaggttgatcgttactggcacaccatgcacggtaactggacgctgcaatacggtttcgccaaaccgtccgaacagagctttaaatttgaagagggtacggatgcggcattccacggtttctggctgtggccgtgcacgatgctgaacgtcaccccgatcaaagggatgatgacggtcatttatgaattcccggtggattctgaaactaccctgcaaaactacgatatttacttcaccaatgaagagttaaccgacgagcaaaaaagcctgattgagtggtatcgcgatgtgttccgtccggaagatttacgtctggttgaaagcgtacagaaagggctgaaaagccgtggctatcgtggtcaggggcgcatcatggccgacagtagcggtagtggcatttccgaacatggtatcgcccatttccataatctgctggcgcaggtgtttaaggactaatgacatcggcggcggtattttccgccgctgggctgatttttgatggagtacagcaatgagtgactatcaaatgtttgaagtacaggtgagccaggttgaaccccttaccgaacaggtgaaacgcttcacgctggtggcaaccgatggcaaaccattacctgcgtttaccggaggaagtcacgtcattgtgcagatgagcgatggtgataaccagtacagcaatgcgtatagtctactgagtagcccgcatgacacctcttgttatcagattgccgttcggctggaggaaaacagccgcggcggttcccgctttttgcatcagcaggtaaaagtgggcgatcggttaacgattagtacgcctaataacctgtttgcgctaattcccagtgccagaaagcatctgtttatcgcgggcggtattggtatcacccctttcctgagccacatggcagagctgcaacacagcgacgtcgactggcagctacattactgcagccgaaatccagaaagttgcgcatttcgtgatgagctagtccagcatccgcaggctgagaaagtccatttgcatcatagtagtaccggaacacgactggaattagcgcgattattggcggatatcgaacctggcacacacgtttatacctgtggccccgaggcgctaattgaagcggtaagaagtgaagctgcgcgtctggacatcgccgccgatacgctgcactttgagcaatttgctatcgaagacaaaaccggcgatgcatttaccctggtgcttgcccgttccggaaaagagtttgtggtgccggaagagatgactattttgcaggttattgaaaataataaagccgcgaaagtggaatgtttatgtcgtgaaggggtatgcggaacctgcgaaacagcaatactggaaggtgaagctgaccatcgggatcaatattttagcgatgaagagcgtgccagccagcaaagtatgttgatctgttgtagccgtgcgaagggtaaacgcctggtgttggatttgtaatttgccgaagccggatgtggcgctgagcgcgcccagtccggcttcggaagattttactgcggatattcctgcaataaattgtgtaatgcttccgccatcagctcaccacgccagccggaaatcagctccggcaaattgttctgcggtttcagtttccagtgccagttcagcagttggttgatttgccgacggcttgccagcaattcggcgctgatcttatgcgtttcgctcacgtcagtaatcaggctcttaatcgctttaaacgctttacgataacccggcatgtccatcaggttaagcatcggctgcggtaaggcatcttccggcaatgtctgcgctttttccaccagcgctagcagcgttttaccgtgaaagcggatttcgctaccggataaacccaggctgtccagttcgcctaaacttcccggcatataacgcgctacgctccacaaatgctcttcacgcacgacaaagttcaccgccagatcgcgctctcgcgccttgcgcagtcgccagtcggctaacagttgcagacaggccagttggcgtgtgcgtaattgccaggcattggtgatatcacgccaggcatcttccggcgcaacgacttcctgacgacgcatttgcatcaggcggcattcatccagcgccgcaggtagccagccggaggcctccgtttctaccataagcttggcggtgatcggtaacagataccagacatccgccgctgcgtattcacactgacgttcggtcagcggtctggccagccagtcggtgcggctttcactcttgtccagcgtaacgccggaatactcttccaccatggaagcgaaaccccaactcatcgggcgtccgcagaaggcagcaaggatttgcgtgtcaatcaagggttgtggtaattcgccaaagacattgaggaacacttccagatcttcactgcctgcatggagaaattttgtgatggacggatcgcgcaggatcgctttcagcggactccagtcggtgatcccgagtggatcgattagcgccagatgctcgccatcgaaaagttgaatcaaccccagctgcgggtaataagtgcgcgtacgaacaaattcagtatccagggctatcgccggaaaggcacggacggcttcacacaaagaagccagcgcatcgtccgtggtaatcatttggtaattcaaattgttttctctttagtgggcgtcaaaaaaaacgccggattaaccggcgtctgacgactgacttaacgctcaggctttattgtccactttgccgcgcgcttcgtcacgtaattctcgtcgcaaaatttttccgacgttagatttcggtaactcatcacgaaactccaccagcttcggtactttgtatcccgtgagctgacggcggcaaaaagtcaccagactctcttcggtaaggcttggatcttttttcactacgaagattttcaccgcttcaccactggagccggaaggtacgccaacagccgcgacttcctgtacgccaggatgctgcatgacgacatcttcaatctcgttgggatagacgttaaaaccggaaaccagaatcatgtcttttttacgatcgacaatgcgcaggaatccttcttcatccattaccgcgatgtcgccggtgtgtaaccagccatttttgatgatttcatcggtagcatcgggacgctgccagtaacccagcatcacctgcggtcctttgacacaaagctcacccggttgacctggtggtacttcattatcatcatcatccaccagtttggcttccgtgctcggcaccggcaaaccgatgctaccactatgataatcaatatcatatgggttaacgctgaccagcggcgcacactcggtaaggccatagccttccagcagatactgtccggtcagtttcacccaacgctctgccaccacttgctgcactggcatcccaccgcctgcggaaagatgcagactggagaaatccagctgctggaactctttattgttcagcaacgcattgaacaaggtgttaacgcccgtgatagcggtaaacggatatttcgctaactcttttaccaaccctggaatatcgcgcgggttagtgataagcaggttctgcccacccagttcgataaacagcaggcagttaatggtcagggcaaaaatgtgatacagcggcagcgccgtcaccaccagctctttgcccggatgcaacagcggaccataggtcgcgttaacctgttccaggttcgccagcatattgcggtgagtcagcatcgcgcctttcgccacaccagtggtgccgccggtgtattgcagaaaagctaaatcttccggcaccagttcgggtttgacgtactgcatccggtagccgttatgcagtgcgctacgaaaactaatggcatctggcagatggtatttcggcaccaaacgcttgatgtatttaacaacgaaattgactaccgtgccttttgccgtagatagctgatcgcccatacgggtcagaattacgtgctgaacggcggttttatcaaccactttttccagtgtgtgagcaaagttagacacgataacaatcgcgcttgcgccgctatcgttaagctgatgctcaagctcacgcggggtatacaacgggttaacgtttacgacgatcatcccggcacgcaaaatgccaaacagcgccaccggatattgcaataaattaggcatcatcaacgcaacgcgatcgcctttcttcagccccaacccttgttgcaaataagcggcaaacgcgcgactgcgttcttccagcttgcggaaggtcattacctcccccatattcacaaacgcaggttgatcggcgtagcgcgcgacgctctgctcaaacatatctaccagagattgataacggtcagggttgatctccgtcggaacgtccgcgggataacggttaagccaaaccttcttcaattcttcacctctaaaatgcgtgttcgtcgtcatcgcaaccccaaatgatatacatgccgttaacataatattaactcatcataccagcttgataattacccaacgaaaaggttgcgaagcgcgtcactatttatttttatctttaccgtaagaatgcagaaacagcggaccagccgctgtttctttttctttaaaaacaagcaattattcagttacaactgtttgtactctcgcggggccgggattataccagccccatccgccgtagccatagggccagccacgaccgccataaaaccatggatcaatcggctgaggcggcataatcacctgctgggttaaatgccaacgtttgtaacccgttacttgcatcaccataaatttatagggcgtattgccgattttgccgtcaaccgcaccagtgattggcccgactaccgtaaccagttgtccacggaaatccaccgggtccagaaaaccgttcacatcggcataaatgcgaccgcgagaaggttctcccagcgtcggtctggctccgctgtccagcggtacggtagcaatttccaggcgagttttcccttgctggttttgtaccgcaaccactttgccaccaaagcgtgcctcctgaccaacgtacagctgcggcgcactcatcacccgaactaaatcttgttgcggcgtgggactgctgcctttaatggcgtccggcacagtgacacaaccgctcagcattagcgcaaacgtacctgccagtatgcctttgataacattcttttgaaccgccatggtgcgactcctttttttctcagggcatactcttaagattcattctttgcccggaagtttcttccatgcgacgttgttacgtaaataaaccggttcggcatgttccaccgccaccgttttaccctcagcaaacatctgacacgcaatcggcagcatatcttcagcagcaggcagtaacacttcgccatcgcgcaaaaccagcccgctctctttaccgagatccggccaagcttgccagcccgtccctaccgtcacccattcgccggaaagctgttgcattcgttcatggacgatttcgggtttgagtacggcttcggtttcttcaccgtgccagataccgttttcatcacgctgatattcggcccagtaaacttcgcccattcgcgcgtcaatggctgccagcacgcgggttgcgccgtttttgcgccacgccccttgcgccatcgtcattagcgtggagacgccaatcatcggtaattccgcgccaagcgccagcccttgcgcgatgccaataccaatgcgcacgccagtaaagctaccggggccgcgcccgtaagccagagcgttaatatcagtcagggaagttccgctggtggtcaggatatcctgcaccatcggtaagattcgttgagtatgttcacgagggcaaagctcaaaatgagcgttgacagtaccgtcgttccacagggcgacagagcaggcctctgtcgcggtatcgatagccagaattcgcatgggtcttcgtgcttagatcaataaaaaggcgcgcatcataccatactccgtaacaaattacctggaggatggtatcgcaaggaaacgaaccgcacgggcaatgtcacgggtgcgtggcgcgggcggcagactggcgagaaacgtcgcgccgtaaggacgcatcaccagccgattgtcacaaatcaccagcacgccacgatcgtcggcgtcgcgaatcagtcgccctaccccctgtttgagagtaatgacggcatctggtagttgcacttcatcgaacgggtcgccaccgcgcaaacgacaatcttccatgcgcgcttttaacagtggatcatccgggctggtaaacggcaatttgtcgataattaccaaactcaatgtatcgccacgcacgtccaccccttcccagaaactgctggttgccacaagaagcgcattaccggcgctgacaaattgctgcaacagttgccctttgctggtttccccctgcaacaatacaggaagcgtcatggtagcgcggaactgctcggccagatcgcgcatcatggcgtggctggtacaaagcataaaacaacgaccgttgttagcttcgatgatcggtcgcagcattgccgctaactggcgagcagaacctggctggttggtttgcggcagattgcgcagcacacagagtaacgcctggcggctgtaatcaaatgggctgggcaacagcaagctctcggcctgttcgatgccaagccggctggtgaaatgatgcagatcgtcgttcacgctcagcgttgcactggtgaagatccagctaccgggtttttgcgccattaactctttgaatttatccgccacgctgagcggcgtgagagccagagtaaaatggcggctagtgcattcgtaccagtagctgtagcccggctgattgatctcttttagccgcttcagccgtgtgcgatacaacgtggcgcgctcaaatgccgcatccagcaaggcggaacgccccagactcagtttcgccacgtcataacaaagttccagggtgtcatcgagcagtaaaaatgcccgctgaatttgcggattagctaacagctcacgcaggttaccgcgataacctggctcaccgagttgcagacgaaaatcctgcgcactctgggcaagacgatcagcgcacttttgtaactgctgggtgtcttttaattcggtgcggtaggcgatggtgatgtcttttgccaggtcgagcagttgtcgactggagagactctgaccaaaatactggctggcaatgtccggtagctggtgggcttcgtcgaagatcatgacgtccgcttccgggatcagttcgccaaatccactctctttaaccaccatatccgccagaaagagatgatggtttaccaccaccacatcggcgtccatcgcttttttacgtgctttgaccacaaagcaatctttatacatcgggcagtcgctgccaagacagttgtcgttggtgctggtgaccagcggccacgcctgactatcttccgccacgctgacgcaggtgctgatatcaccatcgactgtttgattagaccaggagcgcagcaggatcacatcgcttaagatttgtaccggcagatcgccccccgccagcgcctgctgttcgagacgttcgaggcagaggtagttactgcgccctttcagcagcgccacgttgcccgtatatttcaatgccttactgactgttggcaaatcgcggctgtagagctgatcctgcaacgctttactgccggtgctgataatgactttctttttcgcccgcagcgcaggagccaggtaagcgtaggttttgcccgtaccggttcctgcttccaccaccagcggctggcctttttctatcgcctgggtgacggctaccgccatctgtcgctgtggttctcgcggcttaaagcctggtatcgctttcgccagctgaccgtctggtgcaaaatcgtccgtcacactaccccctgttgatttgaacagggattatgtcaggatgagggcgctttcgccagttgaagtggtgacggcgacctcacattgtggcagtctttgcagcacgaaaatggaagtataatgaggacaaaatgatgactatcgttcgtatcgatgctgaagcccgctggtctgatgtagtaatccacaacaacacgctctactacactggtgtaccggaaaacctcgacgccgatgcctttgagcaaaccgccaacacgctggcacagattgacgccgtgctggaaaaacagggcagcaataaaagcagcattctggatgccaccattttcctggccgataaaaacgacttcgcggcgatgaataaagcgtgggatgcttgggttgtcgcgggtcatgcgccggtgcgctgcacggtacaagcgggtttgatgaacccgaagtataaagttgaaattaagattgtggctgcggtgtaagctttatcgaagcaaaataagtcagacgataatttatcgataatactggtcggttttacataaatcgaccagagaataagatattactgttgatgcttctgctaattcattatttatatttataatttcaattttatctataaaactaactatataaataaacataaacatgccgttgtgttcgccctttgattagcaactctggttttctttcttagctgaacaatctggttatagcgtgcggactgaccgttaaatttctccatcttactggataacacaccatgagctgctacctttaaaacacctgaatgtcaacaggttaactcgtgccatatcgttataatccctttgatattagatgcaaattaaggtcatatatagccttatcgataacatggttaattttaaggataagaatatgcctgctgtaatagataaagccctggatttcattggtgccatggatgtaagtgcgccaacaccaagtagcatgaatgaaagcacggcgaagggaatctttaaatatttaaaagaactgggagtacccgcgagtgccgctgatattacggcgcgagctgaccaggaaggctggaaccctgggttcacggaaaaaatggttggatgggcaaaaaaaatggagacaggtgaacgttctgtgattaaaaatcctgaatactttagtacatatatgcaggaagaactaaaagcactggtctgagttaaatttatatcagcataaatgggtcaggacgcttttaatcacatataaaaagcgtcctttttctcacaatcaaatgatcatcggcttctataacgaaatcgatacggattagtgtgttactcgtcttcatcctcaaaacgcgccacgattcgctcgccggagtggttggcacgcagctcttctgccaccagcgcgattgcctggccgctgctcatcccttgtgccatcagttcctggatccgctcgacagctttttgctgctgttcatgggtgagactaggtaaacctgcaaacattgttaactcctgctaaattgttggcgctaattatttcatgctacccggcacatagccagtagagtcaggactgatgaagacgttatctcccgctgtgattactttactctggcgtcaggacgccgctgaattttatttctcccgcttaagccacctgccgtgggcgatgcttttacactccggctatgccgatcatccgtatagccgctttgatattgtggtcgccgagccgatttgcactttaaccactttcggtaaagaaaccgttgttagtgaaagcgaaaaacgcacaacgaccactgatgacccgctacaggtgctccagcaggtgctggatcgcgcagacattcgcccaacgcataacgaagatttgccatttcagggcggcgcactggggttgtttggctacgatctgggccgccgttttgagagtctgccagaaattgcggaacaagatatcgttctgccggatatggcagtgggtatctacgattgggcgctcattgtcgaccaccagcgtcatacagtttctttgctgagtcataatgatgtcaatgcccgtcgggcctggctggaaagccagcaattcagcccgcaggaagatttcacgctcacttccgactggcaatccaatatgacccgcgagcagtacggcgaaaaatttcgccaggtacaggaatatctgcacagcggtgattgctatcaggtgaatctcgcccaacgttttcatgcgacctattctggcgatgaatggcaggcattccttcagcttaatcaggccaaccgcgcgccatttagcgcttttttacgtcttgaacagggtgcaattttaagccttagcccagagcggtttattctttgtgataatagtgaaatccagacccgcccgattaaaggcacgctaccacgcctgcccgatcctcaggaagatagcaaacaagcagtaaaactggcgaacagtgcgaaagatcgtgccgaaaatctgatgattgtcgatttaatgcgtaatgatatcggtcgtgttgccgtagcaggtagcgtaaaagtaccagagctgttcgtggtggaacccttccctgccgtgcatcatctggtcagcaccataacggcgcaactaccagaacagttacacgccagcgatctgctgcgcgcagcttttcctggtggcagtataaccggggctccgaaagtacgggctatggaaattatcgacgaactggaaccgcagcgacgcaatgcctggtgcggcagcattggctatttgagcttttgcggcaacatggataccagtattactatccgcacgctgactgccattaacggacaaattttctgctctgcgggcggtggaattgtcgccgatagccaggaagaagcggaatatcaggaaacttttgataaagttaatcgtatcctgaagcaactggagaagtaagacgtggaataccgtagcctgacgcttgatgattttttaagccgctttcaacttttgcgcccgcaaattaaccgggaaaccctaaatcatcgtcaggctgctgtgttaatccccatcgtccgtcgaccgcaaccggggttgttgctgactcagcgtagcattcatctgcgtaaacacgctggacaagtggcattccctggaggtgcagtcgatgacacggacgcaagtgctatcgccgccgcgctgcgcgaagctgaagaagaggtcgctataccgccttccgccgttgaagttatcggcgtgctgccgcccgtcgatagcgtcactggctaccaggtaaccccagtggtcggcattatcccgcccgatctgccgtatcgcgccagtgaagatgaagtcagcgcggtgtttgaaatgccgctcgcccaggcattacatctgggtcgttatcaccctttagatatctaccgccgtggtgatagtcatcgggtatggctgtcctggtacgaacagtattttgtatggggaatgaccgcaggcataattcgtgagctggcgctgcaaattggtgtgaaaccctgactatacttatctttacatctacaaaacactacttgagacaatcatcgcaatattagttaaatcgcggtttttgattagtttaattcatgtgaatagttaagccagtcgccgcgttccctcttacactatgcgctgttattagttcgttactggaagtccagtcaccttgtcaggagtattatcgtgattagtctattcgacatgtttaaggtggggattggtcccagttcttcccataccgtagggcctatgaaggcaggtaaacagttcgtcgatgatctggtcgaaaaaggcttactggatagcgttactcgcgttgccgtggacgtttatggtagtctgagcctgacgggtaaaggccaccacaccgatatcgccattattatgggtcttgcaggtaacgaacctgccaccgtggatatcgacagtattcccggttttattcgcgacgtagaagagcgcgaacgtctgctgctggcacagggacggcatgaagtggatttcccgcgcgacaacgggatgcgttttcataacggcaacctgccgctgcatgaaaacggtatgcaaatccacgcctataacggcgatgaagtcgtctacagcaaaacttattattccatcggcggcggttttatcgtcgatgaagaacactttggtcaggatgctgccaacgaagtaagcgtgccgtatccgttcaaatctgccaccgaactgctcgcgtactgtaatgaaaccggctatagcctgtctggtctcgctatgcagaacgaactggcgctgcacagcaagaaagagatcgacgagtatttcgcgcatgtctggcaaaccatgcaggcatgtatcgatcgcgggatgaacaccgaaggtgtactgccaggcccgctgcgcgtgccacgtcgtgcgtctgccctgcgccggatgctggtttccagcgataaactgtctaacgatccgatgaatgtcattgactgggtaaacatgtttgcgctggcagttaacgaagaaaacgccgccggtggtcgtgtggtaactgcgccaaccaacggtgcctgcggtatcgttccggcagtgctggcttactatgaccactttattgaaagcgtcagcccggacatctatacccgttactttatggcagcgggcgcgattggtgcattgtataaaatgaacgcctctatttccggtgcggaagttggttgccagggcgaagtgggtgttgcctgtagtatggctgctgcgggtcttgcagaactgctgggcggtagcccggaacaggtttgcgtggcggcggaaattggcatggaacacaaccttggtttaacctgcgacccggttgcagggcaggttcaggtgccgtgcattgagcgtaatgccattgcctctgtgaaggcgattaacgccgcgcggatggctctgcgccgcaccagtgcaccgcgcgtcagcctggataaggtcatcgaaacgatgtacgaaaccggtaaggatatgaacgccaaataccgcgaaaccagtcgcggtggtctggcaatcaaagtccagtgtgactaatacttcttactcgcccatctgcaacggatgggcgaatttatacccgctttctcgtctgctgtaatattccccactacacttccactgttgcgtcaggcgtttgtcgccatacgcttacagggtggcccgcatgcaaaaagcacaacggatcattaaaacctatcgtcgtaatcgaatgattgtttgtacgatttgcgcactcgttacgctcgctagcaccctgagcgtgcgatttattagtcagcgtaacttaaatcaacaacgggtagtacaattcgccaatcacgctgtagaggaattagataaagtactgcttcccctacaggcaggtagcgaagtcttgcttccgctgattggtctgccctgctctgtcgcccatttgccattacgtaaacaggcggcaaaactccaaactgtgcgatccattggcctggtgcaagacggcacactttattgctccagcatttttggttatcgcaatgtgcccgtcgtggacattctggctgaacttcctgcaccgcaaccacttttacgcctgacgatcgaccgtgccctgattaaaggcagtccggttttgattcaatggacgcctgcagcgggcagtagcaatgctggggtcatggagatgattaacatcgacttactgacggcaatgctgcttgagccacaactgccgcaaatcagtagcgccagcctgacggtggacaaacggcatttgctctatggtaatgggctggtagattcccttccgcaacctgaagacaatgaaaactatcaggtttctagccaacgctttccttttaccattaacgttaatggtccgggggctacggcgctggcatggcactatcttccaacacaattaccgctggcggtgctgctaagtttactggtgggctacatcgcctggctggcgaccgcttaccgaatgagcttttcccgcgaaatcaatctgggcctggcgcaacatgagttcgaattgttctgtcagcctttgcttaatgcgcgcagccagcaatgtattggtgtagagattttgctgcgctggaacaatccgcgtcagggctggattagtccggatgtgtttattcctatcgcggaagaacatcatttaattgtgccactgacccgctatgtgatggcagaaaccattcgtcagcgccatgttttcccgatgagtagtcagtttcatgttggcattaacgtcgcacccagccattttcgccgtggtgtgctgataaaagatctcaatcagtactggtttagcgctcacccgattcagcaactgatcctcgaaatcaccgaacgcgatgccttactggatgttgattatcggattgcccgcgagctgcatcgtaaaaacgtcaaactggcgattgatgacttcggcaccggcaacagcagcttttcctggcttgaaacattacgtcctgacgtgctgaaaattgataagagttttaccgcagctataggttctgacgcggttaacagcacggtgaccgatatcatcatcgcgctggggcaaagactgaatattgaactggtggcggagggcgtggaaacgcaagaacaggcgaagtatttgcgccgtcatggcgtgcatattttgcaagggtatttgtacgcacagccgatgccgctacgtgattttcccaaatggctggcgggcagccaaccgccgcccgcccggcataatggacatatcacgcccattatgccgttacgttaacgcttactcatcttcatcgtgcgccggttgctctttaacaatgcgaaccagatcaacacgataatcattggcttcaatgatggtgatatgcagtggccctacatcaatcacatcgcccacacggggaatgtgaccatttgcgctgatcacgaggcccgcgaccgtcgcgatatcatcgtcatcggcaaggtgctcaacatcaagcgcctgctgcaaggcatgcaaatctgtaccgccttttaccagccagccgtcaccatcagtaatgatttccggcgtttcgtcagcgtccgggaattcacccgcaatggcttccagcacatccagcggcgtgaccagaccttgtaccacaccaaactcgttggtcacgataacaaagctcccgcgagcacgacgcagcacgcccaacaggttgatcggatcgagggtttccgggacgataatcgccggagacgcgctagcaatcgccgccacatcaacgccctcttccagcgccaccagcagttctttagcacgtacaataccgatgatttcatccagttcaccgcgacataccgggaacagactgtgcggactagagagcagttgctcgcggatttcatcgaccccgagattagcgtcaacccagcttatttcaccgcgcggcgtcatgatcccgcgcagagaacggctcgccagcgtcagtacgccgttaatcatgtaacgttcttcttcggcaaatgcaccttccgggatcggcatcggcatcgggttatcggcatcgtgctgaacattggcctgacgtttcccgcccatcaaacgcaggatggcatcggcagtacgcgctcgcagcggcaaagtgctctggtggcgaataaagttgcgacgcgcaatctggttaaacacttcgatgatgatgctgaagccaatcgcggcatacaggtagcctttcggaatgtggaaaccgaaaccttctgccaccagactcagaccaatcattaacaggaagctcagacagagcaccaccaccgtggggtgctggttaacgaatcgcgtcagcggtttggatgccagcaacataaccgccatcgcaatcactaccgccgccatcatcaccggcagatggttaaccatccctactgcagtaattaccgcatccaagctgaagacggcgtcaaggatgacaatctgtgtgacgaccacccagaaactggcgtagcctttaccgtggccggaatcatgatcgcggttttccagccgttcatgcagttcggttgttgctttgaacagcaagaatatccccccgaacaacataatcaggtcgcgtccggagaaggagaaatccatgacggtaaatagcggtttggtcagcgtgaccatccaactaatcaggctcagcagccccagacgcataatcagcgccagacttaaccccagcaaacgcgctttatcgcgttgttttggcggcagtttgtcagcaagaatggcgatgaagaccaggttatcgatacccagcacaatttcgagaacaacaagcgtgagtagccccgcccaaatactggggtccattaagaattccatgacaagctcctgcttaaggaatagctattcgacgccagaaataatgcaggcgtaacgacaaaatgcaaacgaaaggtgcggcatagagtgccagaaaggcaggcgttaaaaggcctgatgctgaaatgacgtcggtgacgatccatactgcgggctactgccctatactccatggttgttaaacgggagttaaacatatcagagacgcctctgatttggcaaagatttaccttcctttgcaaacgaatgtgacaaggatattttacctttcgaaatttctgctaatcgaaagttaaattacggatcttcatcacataaaataattttttcgatatctaaaataaatcgcgaaacgcaggggtttttggttgtagcccttatctgaatcgattcgattgtggacgacgattcaaaaatacatctggcacgttgaggtgttaacgataataaaggaggtagcaagtgaccattgctattgttataggcacacatggttgggctgcagagcagttgcttaaaacggcagaaatgctgttaggcgagcaggaaaacgtcggctggatcgatttcgttccaggtgaaaatgccgaaacgctgattgaaaagtacaacgctcagttggcaaaactcgacaccactaaaggcgtgctgtttctcgttgatacatggggaggcagcccgttcaatgctgccagccgcattgtcgtcgacaaagagcattatgaagtcattgcaggcgttaacattccaatgctcgtggaaacgttaatggcccgtgatgatgacccaagctttgatgaactggtggcactggcagtagaaacaggccgtgaaggcgtgaaagcactgaaagccaaaccggttgaaaaagccgcgccagcacccgctgccgcagcaccaaaagcggctccaactccggcaaaaccaatggggccaaacgactacatggttattggccttgcgcgtatcgacgaccgtctgattcacggtcaggtcgccacccgctggaccaaagaaaccaatgtctcccgtattattgttgttagtgatgaagtggctgcggataccgttcgtaagacactgctcacccaggttgcacctccgggcgtaacagcacacgtagttgatgttgccaaaatgattcgcgtctacaacaacccgaaatatgctggcgaacgcgtaatgctgttatttaccaacccaacagatgtagagcgtctcgttgaaggcggcgtgaaaatcacctctgttaacgtcggtggtatggcattccgtcagggtaaaacccaggtgaataacgcggttagcgttgatgaaaaagatatcgaggcgttcaagaaactgaatgcgcgcggtattgagctggaagtccgtaaggtttccaccgatccgaaactgaaaatgatggatctgatcagcaaaatcgataagtaacgtattgtgttgattatcactcagttttcacacttaagtcttacgtaaacaggagaagtacaatggagattaccactcttcaaattgtgctggtatttatcgtagcctgtatcgcaggtatgggaagtatcctcgatgaatttcagtttcaccgtccgctaatcgcgtgtaccctggtgggtatcgttcttggggatatgaaaaccggtattattatcggtggtacgctggaaatgatcgcgctgggctggatgaacatcggtgctgcagttgcgcctgacgccgctctggcttctatcatttctaccattctggttatcgcaggtcatcagagcattggtgcaggtatcgcactggcaatccctctggccgctgcgggccaggtactgaccatcatcgttcgtactattaccgttgctttccagcacgctgcggataaggctgctgataacggcaacctgacagcgatttcctggatccacgtttcttctctgttcctgcaagcaatgcgtgtggctattccggccgtcatcgttgcgctgtctgttggtaccagcgaagtacagaacatgctgaatgcgattccggaagtggtgaccaatggtctgaatatcgccggtggcatgatcgtggtggttggttatgcgatggttatcaacatgatgcgtgctggctacctgatgccgttcttctacctcggcttcgtaaccgcagcattcaccaactttaacctggttgctctgggtgtgattggtactgttatggcagtgctctacatccaacttagcccgaaatacaaccgcgtagccggtgcgcctgctcaggcagctggtaacaacgatctcgataacgaactggactaacaggtgagcgaaatggttgatacaactcaaactaccaccgagaaaaaactcactcaaagtgatattcgtggcgtcttcctgcgttctaacctcttccagggtagttggaacttcgaacgtatgcaggcactgggtttctgcttctctatggtaccggcaattcgtcgcctctaccctgagaacaacgaagctcgtaaacaagctattcgccgtcacctggagttctttaacacccagccgttcgtggctgcgccgattctcggcgtaaccctggcgctggaagaacagcgtgctaatggcgcagagatcgacgacggtgctatcaacggtatcaaagtcggtttgatggggccactggctggtgtaggcgacccgatcttctggggaaccgtacgtccggtatttgcagcactgggtgccggtatcgcgatgagcggcagcctgttaggtccgctgctgttcttcatcctgtttaacctggtgcgtctggcaacccgttactacggcgtagcgtatggttactccaaaggtatcgatatcgttaaagatatgggtggtggcttcctgcaaaaactgacggaaggggcgtctatcctcggcctgtttgtcatgggggcattggttaacaagtggacacatgtcaacatcccgctggttgtctctcgcattactgaccagacgggcaaagaacacgttactactgtccagactattctggaccagttaatgccaggcctggtaccactgctgctgacctttgcttgtatgtggctactgcgcaaaaaagttaacccgctgtggatcatcgttggcttcttcgtcatcggtatcgctggttacgcttgcggcctgctgggactgtaagactgttgtacactaccggggccttttggccccgtttttttatctggaggattaatgacaatcacggacctggtactgattcttttcatcgccgcactcctggccttcgcgatctacgatcagttcatcatgccccgccgtaacggccccaccctgctggcaattcctttgctccggcgtggtcgcatcgatagcgttatcttcgtcggattgattgtcattcttatctataacaacgtcacgaatcatggtgcgttaataacgacatggttattaagcgcactggctctgatgggtttttatatattctggatccgcgttccgaagatcatctttaaacaaaaaggttttttcttcgccaatgtctggattgaatatagccgaatcaaagcgatgaacttgagcgaagatggcgtgttggtgatgcaattagaacagcgtcggctgttaatccgcgttcgaaatatcgacgatctggaaaaaatttataagcttctcgttagtactcaataagttatgaatttagccaaagctatgtttagtgtatttttaataatcagacatagcttaggctatattacctcttcccttatttgttatttattttaacgtttcattgatatataaatccaaatgaaaatcgttatcaataaagcaatgaaataatatattccaacagttgttttatattctcaaaatatgttaaggttgcgccctcatttggggagtagccgatttccagattccggaaatgtacgtgtcaacatactcgttgcaaaacgtggcacgtacggactgaatactttcagtcaggcgagaccatatgcacatcaatcgctatgcctgcatgaacgcgaaaaccatcacggcttgttgttcatgtatgcatgtttgctgggggcgatgatgtgttttatggataccccggtcaggacattgtcatgaatatcactgctactgttcttcttgcgtttggtatgagcatggatgcatttgctgcaagtatcggtaaaggtgccaccctccataaaccgaaattttctgaagcattgcgaaccggccttatttttggtgccgtcgaaaccctgacgccgctgatcggctggggaatgggcatgttagccagccggtttgtccttgaatggaaccactggattgcgtttgtgctgctgatattcctcggcgggcgaatgattattgagggttttcgtggcgcagatgatgaagatgaagagccgcgccgtcgacacggtttctggctactggtaaccaccgcgattgccaccagcctggatgccatggctgtgggtgttggtcttgctttcctgcaggtcaacattatcgcgaccgcattggccattggttgtgcaaccttgattatgagtacattagggatgatggttggtcgctttatcggcagtattattgggaaaaaagcggaaattctcggcgggctggtgctgatcggcatcggcgtccagatcctctggacgcacttccacggttaataagaacgctgccagaggtgaatattaaagtccgtctggcagtcgaacacttcttttgctgccagtgtttgccagacttctggcttcgcacgccaggcaaacggcgtcatctgcaataatgcgacggcttcatcaccgcgaagacgcatcggataacacaactccgcactctgctgtaatgtaaaaccttccagttgttctgcatgaggtgcatgaagatgtacttcattgtaaatcagccccttcagctccatcaaatgtcgcggtcccggcgtggcagtaatgacccagccgccgggcttcactactcgtgctaattcttctgctttacacggcgcgtaaatacgtattatggcgtccatactggtatcggaaaacggcaaacggtggctggaagcgacacaaaaagtgacctgcggatagcgtttcgccgccgcttttatcgctaccttgctaacatccagaccaaacgtggtgatttcgggcaacgcatcggcaaatgcgtgtgtgtaatacccttcaccacagccaatatccagcaccgccgtggccttatcatcaagccgttccctcagttgggcgacaattgcatcacgcagcggctgataatgtccggcatctaagaatgcgcggcgtgcttgcatcatttccgcgctgtcgcccggatcacgagaccgtttatgctgaacgggcagcagattgacatacccttctttcgccatatcaaactgatgtcgctggggacagatatagctgtttttttcacggctaagaggctgatggcaaagtggacaggaaaaagacatgacaactccggcaggatactaaaggccgcaagtgtaacgcgaatcacgcggcgggcaaatatccgaacgccaggagcgaagataaagcatagtaaaaagcctcgcattcgacgaggctttatagcgagattgaagcgtattcacacttcagatcagtggattcgatcagatagctgttacgttaacagctgccggacctttctggccgtcctgaatttcgaactcaacgttctgaccttcagccagagttttgaagccattaccctggatagcggagaagtgtacgaacacatctttgctgccatcagccggagtaatgaagccaaaacctttagactcgttgaaccacttaacctgacctttaatctttgccatttgaaaaattccttagattgttttcttcgcccgcaggcataacatagataaaacactcacattactgcaactggcaccaatataaggctcggcagagaagcggtattcaacgtcaacgtgtttactcaggacttctttactgaaaatgccacacataaacagaactgtacctcgtttaacccgaaatctgttatcacatacaacgttaattatggcaagccatttttaaacatgtctcgatcagacgcacaaatctcgatacgtcttccactttttttgcacacttatgcaacggaatacgcgccgatatatcattgtgcttaaccttgccagttcaggcagatacttaaactggcgtattttctaacatagttcaataagttcagttgttccaggccagtgggagaagttattacatagtgcgtgcaatatcacattttttgctatgcaatgaataaaaagttatatcactttttctcataaaacagtcagttaacggctattaattaccctaaagagaagtcaatccccaaagggattgtaaatttaaaataagaaaaattgatgaatgagcaaaaaaatcaagagagaaacgtttcgctaataaataataccacgcttaatcacaaatccgatgtaaacatcctaataaattaatggggtaaatatctttttctgatatcccgttacgcaaataaataatatgataattatttgaagtcagaccagagttttaatttgaagcagttgcaccatgacagtgcgtataatcaggatgaattgagtaacccttcaacgacggggttactcaagattgaggaaggattatcgttcggcgaccagacgaataatatcttcgtcttcaacgcttttttgactctcaacggtctttttatctgctttctctggttcgtttgcttcgcacaaacgacgtaacagtgcattttgacgtttttgctgatccagcaacgcctcaagcagttcaatctgttcgttagtccgactactggcacgattgataaaaaaccacaagatgagcccgataagaagaaccaccacgcttacaaccaaagacgcaatgttcatcacgccactatttacaacttcgttcatttcaccacctctgagtagaggcgctattctaccactgctggagaggaagaaaatctagtgctgaaaaaatgatatcaccacgggataaactggttaatggcacaaattccgctgaaaaattgtacatcctgatcgcacatcatgttgaatacctgcgcccaaagcagcaagcaagccaacaccacgacaaccagaacgacccatcgaaactttttcactccaatctccgtttcacctaccttatgtcattaaactagcatgcgttagttaaacagcgcctaactatgtcgatattcgtgctttttcggaatgagtcgcttgcttcagcgcatattgccgctacgattaagcgaacataaaaagagaagaggttgtaatgcgattcatcattcgcacagttatgctgatagcactggtatggataggattattactcagcggatatggcgttttgattggaagcaaagagaatgccgcaggattaggtttgcaatgtacctatctgactgccagaggcaccagcacggtacaatacttgcacactaaaagtggtttttttggggataacagattgcccgctgttacgcaaaagcaatatcgtggtcgataatggttaagggcaataaataaccagattctcactcctgagtaaaatactcttatagcaagcgcgtttaatataacgccaccttcaactttatttttctcatgctaaataaagaacctgtctgtttgatattccgacaggttcttactctcatcagaacggatagtcgtgataacccatttgggcagaaattttgcgcgctgcggtatgcaacattgcgacatattcctgtaaacgctcttcagagaaacgcaacgtcgggaaggagatgctcaaaccggcaatgaccacgccaaagcgatcaaataccggtaccgcaatgcatcgcagcccttcttcctgctcttcattatcttcgccatacccctgctcgcgcacctggtccagaacgggtaataacgcttctgtactggtgatggtccgctcggtactgcgtttatactccacgccctcaagaatttgcttcacttcatcgcgatcgcgccatgccagcagtaccttaccaatcgcggtgctgtacagcggattacgacgcccaatccgactatacatgcgcaaattgtacatagagtcaattttgtgaatgtaaacaatactgtcttcgtccagtgcgccgaggtggatagtttctttggtcaggcgggagagctcacgcatctggatatctgcgctacgaattaaatcgacgttttgtaacgcgcgagcgcccagttcaaacaatttcagggtcagggaatatttctcgctctccccttcctgcgccacataacctaaggttttcatggtctgtaaaaagcgataaacggtgcttttactcatcatgacgcgctggctcagctcggttatccctatttcgcgctcttcacccagcgcctgcaaaatgccaaaaacttttagcacggaagatacagaatcaggctgtttatccagatctgcgttagccatttatcacctcattgcgagtgttttataaaaatcagaactgttttttattataatttcgcaccagggtggtcgcaatccatcttttgccggttagttacaattctgcgacatccaccgtgaatatcagtgctagaatcatacccctgttgattattcaccaaagatataaaattcctatgccaaaagttcaggccgacggcctgccattgccccagcgatacggtgcgatattaaccattgtgattggtattagcatggccgtccttgacggcgcaatcgccaacgtcgccctgccaacaatcgccacggaccttcatgccacgccagccagttccatctgggtagtgaacgcctatcaaatcgccattgtcatctccctgctcagctttagctttctgggcgatatgtttggctatcgacgtatttataaatgcggtctggtcgtttttctgttgtctagtctgttctgcgccctttctgatagcctgcaaatgctcacccttgcgcgtgtcatacaaggtttcggcggtgcagcgttgatgagcgttaataccgcacttatccgcctgatctatccacaacgttttctgggtagagggatgggcataaacagctttattgttgccgtctcttctgctgccgggccgacaattgctgcagcaatcctctccatcgcatcctggaaatggttatttttaatcaacgtaccgttaggtattatcgccctgcttctggcgatgcgttttctgccacccaatggttctcgcgccagtaaaccccgtttcgacctgcccagcgccgtgatgaacgcgttaaccttcggcctgcttatcactgcgttgagtggtttcgctcaggggcaaagcctgacgttaattgctgcggaactggtggtaatggttgttgttggtattttctttattcgccgccagctttctcttcccgtaccgctgctaccggtggatttactgcgtatcccgctgtttagtctttctatttgcacatctgtttgctctttctgcgcacaaatgctggcaatggtttccctgcccttttacctgcaaaccgtgctcgggcgtagtgaagtcgaaacaggtttacttctgacaccgtggccgttagcaacgatggtgatggctccgctggcaggctatttgattgaacgcgtacatgcaggattgctgggggctttagggttgttcatcatggctgcggggcttttttccctggttctgctgcccgcgagtcctgcggatatcaatattatctggccgatgatcttatgtggtgctggatttggcttattccagagtcccaataaccacaccattattacctccgcgcctcgcgaacgtagcggtggagccagtggcatgttaggaacggctcgtctactgggtcagagtagcggcgcggcgctggtggcgctgatgctaaatcagtttggagataatggtacacacgtcagcctgatggctgcggctattctggcagtgattgctgcctgtgtcagtggtttacgtatcactcagccacgatccagggcataaaaaaagcgcgtcgatcaggacgcgctttttagtatttacttcatattacttcaggtattcacccgtacgcagagcttcaattcgtttatccagcggcgggtgggtcatgaacaactcactgaggcttttgctcttaccgttaatgcagagagccatcatgctggttgcttcttgcggttcatagctggttttcaggcgctgcagcgcggcaatcattttctcgcgaccaaccagttttgcgctaccggcatcagcatggaattcacgatgacggctgaaccacatggtgataatgctcgccagaataccaaacaccagttccagaaccgttgcaaccgcaaagtagatcagcgggttgccgttgctctcttcaccttcatcacgatttccgcccataaaacccgcggcaagctgcgccagaatacgggaaataaagataacgaaggtgttcaccacgccctgaatcagcgtcatggtgaccatatcaccattggcgatgtggctgatttcgtgagcaattaccgcctcggcttcatccgggctcatgttctgcagcaaaccggtgctgacagcaaccagagaggcatcacggcgcgcaccggttgcaaaagcgttgatgtccggcgcatggtagatagccacttgcggcatagcgatccccgcctgacgagcctgggttgctacagtattgaccagccaacgttccctttcgttacgcggttgctcgatcacttccccgccaacagatcgtaatgccatccatttggacatcagaaggctaacgaaggaaccaccaaaaccgaacagcaaggccatgatcatcagcccctgaacgctgctgctctgtatccctgtcaggctcagtaccagcccgaaaacgaccattacggccaggttcgttagcaggaagagcgcgattcgcatcataattttctttttacctcagtttaacaaaacgcaatatgcgatacccacatcgtatgggttacgcgactattttcaagtctggatagtgcgtaagtcaccagaaagacacaactttacattttgtagcatctgatttacggcatcttgtcgctgttaaaaaatcaggcacaatttcttgtgcctgattgatattacttgacgggagcgggttgttccgcgggtctggctttttcaagcttcgccagatcgagtgcgatattcaccgtctcatccagataaggatccggctcctggtaatctttcggtagatcatccagtttcttcaactccggtttaccttcgcgtttaaagcgttcgttcaaacgcgccagacgcgtcgcatcatcttcattattctctttctcacgcacagcgtaattcagagaaacgatattgcgcttgtccttcatagcgttgaagcgcgcgatatccttcatgatgttctggaactcaggatctttcgcgatacgcgcattatgttccttcagcagctccggttcaaaggccgttaaatctccacttttcacataagtcgcggcatcaatgctatcccacggcagcgcgttatcttcgaatttctcacccgtttccgtttcttcattacccgtcggcatgatgatgtctggcgttacgcctttacgttgcgtactgccgccgttaacgcgatagaatttctggatcgtgtactgcacagaacccagcgctggccattcaggacgtaacatctgatcgtaaatacggttcaaactacggtattgctgaacggtgcctttaccaaacgtcggttcacccacaaccagcgcacgaccgtaatcctgcattgccgcggcaaagatttcactagcgctagcactgaagcggtcaaccagcaccaccagcgggcctttatagaaaacctgtccgtcggtatcgctatcttcacgaaccttgccgttgttatcgcggacctgaacaatgggacccgcaggaataaacagaccggagaggcttacggcttcagttaacgccccaccgccattgctacgcaggtcgatgatgacgctgctgacattctgtttttccagtttctgcagttgcactttgacatcgtctgtcaaacccacatagaagcccggaatatccagcacgccgactttctctttaccgacggtcttcacgctcattttaaccgcgcggtcttcgagacgaatacgttcacgggtcaacgttacagtacgggtcttggtccctttaccagcaggtaaaatttccagacgaactttactgcccttcggccctttaattaaggcaaccacatcatcaagacgccagccaatcacgtcaaccatcggcttgcctgtttgaccaacaccgacaattttgtcaccaacgctgatagctttactcttcgctgccggaccacctgccaccatgctattgataacggtgtagtcatcatccatttgcagcactgcgccaataccttccaggctcaaactcatttcagtgttgaactgttcggtattacgcggggaaagatagttggtatgcgggtcgatttcacgcgcaaacgccgtcattgccaggctgaaaacatcttcgctgttggtttgcgccagacgacgaatggcaaatttgtagcggcgagtcagggtttcacgaatttctttatccgtttttcctgtcagcttcaggcttaactcgtcgaatttgactttactgtcccacagcgcgttcaactcagcctcgtttttcggccagggcgctttgctgcggtcaaggttataagtgtcgttgccggtgaaatccatcggcttttccagtacgctcaaagcgtactggtaacgctcaaaacggcgcttttgcgccagattgtagagatcgtagaaaacgtcgagtttgccactacgcagttcatcgcctaactcggttttctttttcgcgaactgttcaacatcgcttgccagcagcacgttgtggctgtaatcgagcagattcaggtagcggtcaaagattttggcgctaaatgcctgatcgaggtcgaactggcgataatgagaacgggtgaagcggctcgttacgcgctcacttaccgtcgcatgctgcgtctcttcctttaataccggaatttgatcagcacgcgtgatatcttctacagcgaaggtctggcctgctattgcaagcaggccagctaacgcggtaagcctaaaaaacatgttcatgcctggcccggcctccgtttcagaacaccaggtgttctgcgcgcacaatcaaagacataccgctattcagctggacgcggacgccgtctttggtgatttctaatacggtggcatccatcgcgttttgacccgctttcaccttcagggcttgtccgacagtcagagcactaatgtcagaaaccggggtgtgctgttcttcgcgaggtgcttttactgtttttggcgctttctctaccggcttttgcgcacgaggtttacgttcagcgccttctttgcggcgtggcgtagtcggacgtggcttgcgttcgcggcgcggtgcgtcttctttctcaccagcagttgcggcagcttcgcgttttttcgcttgctgttcagcacgctgtgcctgaacacgcgctttcgcttcttcaagctgcttgcgagcatgctctacatgttgctcgtccagctcaccgcatgggttgccgtcaagatcgacacgcgttgcgccgggtttaacaccgtaaagataacgccagctgctagtgtagagacgtaaagcggatcgcaattgcgttttgctcaggttcatttccccagcaacacgatcgaccaaatcctgaaaaataccgattttcagcggacgcgcttcaccttccgcactgaaacagtggggaaaacgttcggccagaaacgcgattacttctttactgctattcaacttaggttgattttccatgaaatttcctgattacaacggacgtagccaacaagcgcaggcatgaacaggcgtcattataatgacgctatcagtaaatgctacgttatccgttgattatcctgcgacgctcgcaaagaattttttgtaatccgtcgttgcaagcactttttcaagctgtgccacaagctgacgtaagccttgctcgtcctcgtctgtaaagcgaccgaagacggtactatcgatgtcgagaacaccaataatctgatttttcaccaccagcggcagaacaatttcagaattactcgccgcatcacaggcaatatgcccgtcaaacacatgaacatcctcgatacgctgcacttgattgcgggcaaccgcagtgccgcacacgccgcgcccgacgggtatccggacacaggcaattttgccctgaaatggtccgagtaccagtgtatcgtcctcaagcaaataaaaacctgcccagtttatgtcagtgagacgctcatataacaacgcactggtgttcgcaagcgttgccagaaaactggtttctcccgccatcagcgcgttaaagtcgcgatttaaatccgcgtaaaattctgttttgttcattatataatcacttggttgtcttacctggatctgccagcctattaaaataagcattaaatgcgttaatgctcaagatcattcccatcatgggttaagattaatgttaattcttattacatttggcacgtcatggctcttaacacaccacaaattacgccgacaaaaaagataacagtgagggcaatcggcgaggaactgccgcgtggtgattaccaacgttgcccgcaatgtgacatgctgtttagcctgcccgagataaattctcatcaaagtgcctattgtccgcgctgtcaggcaaaaattcgtgacgggcgcgactggagcctaacgcgcctggcggcaatggccttcaccatgctgttgcttatgccgtttgcctggggcgaaccgctgttgcatatctggctgttaggcattcgtattgacgccaacgttatgcaaggcatctggcaaatgaccaaacagggcgatgcgataacggggagcatggtctttttctgcgttattggtgccccgctcattctggtgacctccatagcttatttatggtttggtaaccgactgggaatgaatttacgtccggtactgctgatgcttgagcgacttaaagagtgggtaatgctcgatatctacctggtcggcattggcgttgcttctataaaggtacaggattatgcccatatccaggctggtgtcggcttgttctcttttgtggcgttggtgattttaacgacggtgacgttgagtcatcttaatgtcgaagaactgtgggagcgattttatccgcagcgccccgctacgcgtagggacgagaaacttcgtgtctgtcttgggtgccattttaccggctatccagatcagcgtggtcgctgcccgcgttgccatatcccgctacgcctgcgtcgccgtcatagtctgcaaaaatgctgggcggcgctgttagcgagtatcgttttattgttacctgccaacctgttgcctatttctatcatttatctgaacggaggacggcaggaagatacaattctttccggaattatgagcctggcaagtagcaacattgcggttgcaggaatcgtgtttatcgccagtattctggtaccgtttactaaagtgatcgtcatgttcactttactgttgagcattcattttaaatgccagcaaggtttacgcacacgcattctgttactgcggatggtgacctggattggtcgctggagcatgctcgacctgtttgtcatatctttaaccatgagcctgattaatcgcgatcagatcctcgcttttactatgggaccggctgcgttttatttcggcgcagcggtaattttgactattcttgctgtggaatggctggacagccgcttactttgggatgcacatgagagtggaaacgcccgcttcgacgactgaataaccgcttactttgggatgcacatgagtcaggaaacgcccgctagcacgactgaagcgcagattaaaaataaacgccgtatcagtcctttctggctgctgccgttcatcgcgctaatgattgccagttggctgatttgggacagttatcaggaccggggtaataccgtcaccatcgactttatgagcgcggatggtattgttccaggccgtacgcctgttcgttatcagggcgttgaagtcggaacagtgcaggatatcagcctcagcgacgatcttcgtaagattgaagtcaaggtcagcatcaagtccgatatgaaagatgcgctgcgcgaagagactcagttctggctggtgacgccaaaagcaagcttggcaggtgtctccgggctggacgccctcgtcggtgggaactatatcggcatgatgccgggtaaaggtaaagagcaggatcactttgtcgcactcgatacccaaccgaaatatcggctggacaatggcgatctgatgatccacctgcaagcccccgatctcggtagcctgaacagcggtagtttggtctatttccgcaagatcccggtgggaaaagtctacgactatgccatcaatcccaacaagcaaggcgtggtgattgatgtcctgatcgagcggcgttttaccgatctggtgaaaaaaggtagccgtttctggaacgtttccggcgttgatgccaacgtcagtatcagtggcgcgaaggtgaaactggaaagcctggcggcactggttaacggtgcgattgccttcgatagtccagaagagagcaaacctgccgaggcggaagatacctttggtctgtatgaagatctggcccacagccagcgtggcgtaataataaaactggaactgccgagtggggccggattaaccgccgacagcacgccgttaatgtatcaggggctggaagtcggacagctgactaaactggatttaaatcctggtggtaaagtcacaggggaaatgaccgttgatcccagcgtcgttaccctgcttcgtgaaaatacccgcatcgaattacgcaacccgaaattatcccttagcgatgctaatctcagcgccctgctgaccggcaaaaccttcgagctggtgcccggcgatggcgagccacgcaaagagttcgttgttgtgccaggcgaaaaagcactgctgcatgaacctgatgttctgacgctgaccctgaccgcgccggaaagttacggtattgatgcgggtcagccgctcattcttcacggcgtgcaggtaggccaggttatcgatcgtaaactcaccagcaaaggcgtcacctttaccgtcgccatcgagcctcagcatcgcgaactggtaaaaggcgatagcaaatttgtcgtcaacagccgtgtcgatgtgaaggtggggctggatggcgttgagtttctcggtgccagcgccagtgaatggatcaatggcgggatacgtattctgccgggcgataaaggtgagatgaaagccagctatccactgtatgccaatttggaaaaagcgctggagaacagccttagcgatttacccaccacaaccgtgagtttgagtgcagagacgctgccggatgtgcaggcaggaagcgtagtgctgtaccgtaaatttgaagttggtgaagtgattaccgtgcgtccgcgagctaacgcgtttgatatcgatctgcatattaagccggagtatcgcaaccttctgaccagcaatagcgtgttctgggcagaaggcggggcgaaagttcagctgaatggtagtggtctgaccgtacaggcatccccgctctccagagcattaaagggagccattagcttcgacaacctcagcggtgccagcgccagtcagcgtaaaggcgataagcgtattctgtatgcttccgaaacagcggcccgtgcggttggcgggcagattacgcttcacgctttcgatgccggaaaactggcggtcgggatgccaattcgctatctcggtattgatatcgggcaaatccagacgctggatctgattaccgcacgcaatgaagtacaggcaaaggcggtactttacccggaatatgtccagacctttgctcgcggtggtacgcgcttcagtgtggtcacaccgcaaattagcgcagctggcgttgagcatcttgatactatcctccagccgtatatcaacgtcgaaccaggccggggcaatcctcgccgcgactttgaattacaagaggccaccattactgatagccgttacctggatggcttaagcattattgttgaagcgccggaagccggtagcttaggcatcggtacgcctgtgctgttccgtggtctggaagtcggtacggttacaggaatgacgctggggacattgagtgatcgcgtgatgattgcgatgcgcatcagtaaacgctatcaacacctggtgcgtaacaattccgtcttctggttggcaagcggttacagtctggactttggtctgacgggcggcgtagtgaaaaccggcacctttaaccagtttatccgtggcggcatcgccttcgccacgcctccgggtacgccactggcaccgaaagcccaggaaggcaaacacttcctgttgcaggaaagtgaaccgaaagagtggcgtgaatggggaactgcgcttcccaaataatgcccactgctccggcgtgcctgcgccggagcgtttatgctaaactgcgcgcctgtttttttgccagtggtacatgctcgtggcccaacacaccgtttatttcccggacgcctttctgacacaaatgcgcgaagcgatgcctagcacgctcagttttgatgattttcttgccgcctgtcagcgcccgttgcgccgcagcattcgcgttaatacgctgaaaatctccgttgctgatttcctgcaattaaccgctccttatggctggacgcttacgccaattccgtggtgtgaagaaggtttctggattgaacgcgacaatgaagatgcattgccattgggtagtaccgccgagcatttaagtggcctgttttatattcaggaagccagtagtatgttgcctgttgccgccttgtttgctgacggtaatgcaccacagcgggtgatggatgtcgctgccgcgcctggctccaaaacgacgcaaatttccgcgcggatgaataacgaaggggcaatccttgccaatgagttttccgccagtcgggtaaaagtgttacatgccaatatcagccgctgtggtatcagtaatgttgcgctcacacattttgatggccgcgtgtttggtgcggcagtgccagaaatgttcgatgccattttgctggacgctccctgctctggcgaaggcgtggtgcgtaaagatcccgatgcgctaaaaaactggagtccagaaagcaatcaggaaatcgcagctacacaacgggagcttatcgacagcgcctttcatgcattacgtcctggtggtacgctggtttacagcacctgtaccttaaaccaggaagaaaacgaagccgtttgcctgtggctgaaagagacttaccccgacgcagtagagtttttaccacttggcgatctcttccctggtgcaaacaaagcgctgaccgaagaaggctttttgcatgttttcccacaaatttacgactgcgaaggcttcttcgttgctcgtctgcgtaaaactcaggcgattcccgccttacccgcccccaaatacaaagtcggtaattttccgttcagcccggtgaaagatcgcgaagctggacaaattcgtcaggcggctacaggtgttggcttaaactgggatgaaaacctgcgcctctggcagcgtgacaaagaactgtggttgttcccggtgggcattgaagccctgatcggtaaagtccgattttctcggttggggattaaacttgccgagacgcacaacaaaggttatcgctggcagcatgaagcggttattgctcttgccagtcccgataatatgaatgcattcgagctgacaccgcaggaagcggaggagtggtatcgcgggcgcgatgtttacccgcaagccgcgccagtggcggatgatgtattggttactttccagcatcaaccgattggtttagccaaacggattggtagccgattgaaaaacagctatccgcgtgaactggtgcgcgatgggaaactttttaccggtaacgcctgacagcgcacaaaaaaagcgcactttttgactggcacattcggctgcctcaactaggctgaaaaatggtgcgatcggactggtcgtaccacaatcggcagctaaatggagagcacgaagatgaaaaccagtgtgcgcataggcgcttttgaaatcgacgacggcgaattacacggtgaaagcccaggtgatcgaacgttaaccattccttgtaaatctgaccccgatttatgtatgcaactggatgcctgggatgctgaaaccagtatccctgccctgctaaatggcgaacactctgtcctttaccgtacccgttacgatcaacaatctgatgcctggattatgcgtcttgcctgatccaaaaagaacccgtcggcatggcgggttatttgtcctggttattcccccgttgtaaaatctctcctaaacttaacggtacggcaccacacttcggggatgaaatgttcgcgctggtactttttgtttgctacctggatggcggttgtgaagatattgttgtggatgtctacaacacggaacagcagtgtctttattctatgagcgatcaacggatccgccagggcggttgttttccgattgaggattttatagatggtttctggcgacctgcacaggagtacggtgatttttaattattgcaattgcacaagagtcagttcgcccccaaagacagcaccggtatcaatataatgcaggttgccaatatccacgcgatgtcgcaacggtgtatgaccaaaccagaaatgatcagcacctgtaattccctgccctttttggcgttcacctaatcggctgcggctccacaagacctgatgcaaatcaacgtccttttgccattcataaacatcatctggataatcggcatgagcaataatatgcttgccggtgcgactgtgtacttcaagaataaagggcaaatgctgacatttttccagcgccgttttcgcttgtttctgttgattatctgccagcgcaataaaccagtcgccgccattcatcaaccacaaagacatctgctgggatgccagcgcatccatcgccatctgttcatgattgcctcttaccgcacaaacccaatgttgttccagtaactgcagacaacgtaaactttgcggcccacgatcgataacgtctcccacactgataagtaaatctcgccacggatcaaaacgacaatgccataatttgcggcgcaactgctcaagacaaccgtgtatatcgccagaaagccagatatgtcgccattgatgacccgcaattctctgataaacgggcgcaggctgtttcatcaatattttcctcccgcgctaaagatcacataatcttaacaagaatgttaaaaaacgctggactcagacagtagagtgtgtgttatggttgactataaagtcagcgaaggaaatgcttctggcttttaacagataaaaagagaccgaacacgattcctgtattcggtccagggaaatggctcttgggagagagccgtgcgctaaaagttggcattaatgcaggcttagttgccttgccctttaagaatagatgacgacgccaggttttccagtttgcgtgcaaaatggtcaataaaaagcgtggtggtcatcagctgaaatgttaaaaaccgcccgttctggtgaaagaactgaggcggtttttttattggaaatcaaaaggctattttaggtaattaacagagtttttcagctcgttctataaacggtgccagactcattttttcgccgggattgttaggatcatcaatctgaatcacgctaatgggttgggcattggtcttcccactggcaacttccttttgtgcgatatcgtttaaaggatactgcacgagggtactcggattaataacatacaaagcattacccggtcggcaagtcagcatcacctcttcgcgattaaacgcccatttgtctttacccacttcaaaacgactgacggtaatcacctgcggtgcagccagcgccgctgcagaactggtgagtaacagaaacgccagaatactttttttcatcattttcgtaatccatcaaaaaggttcgagagtcgcaagcaggctgatgatcaccagcactaccgcacctatcgcccattcgagtttagtcatccacacaaaccagggtgccgcacgatcttcatcctgcctcatgcgcggtacaagaacataacgattagccagcgcaatgaccaccataatcatcaccaggatggctttgagcaataagagttggccccagtaagtcgtaagcgtggggggaaatccggtaatcaacaatgcattaagcacgccgcttgccagtacgccgatcaccgcaaaatgcccgcaccaggaaaaacgcatcagcgcctgaatagcctggtgtcgccaacggcctttgatgagttgcatacaccagagcaccggcagtaatcccccaaaccacgccgccgcacaaatcaggtgaatcgcgtgattagtctgatggattttcgctgttaccccttcattcagcgtcgcatgccccactcccgccagcagaataaattgcgcggtagtgagcataaacagcaaacgtggcatattccgcggttgcataagggcgacgatcaacgttacgagggcgagaacaatttgccataaccagatgccaccaaactgcgtttgcaaaacagcctgccaaatgtttgggctaaatacatctgtccatcccgttcccatcaacccgccctgaacggcgagcattgcagtggcactgatcaaactccagacggcagcgtgctgttgtaaacgcagaaaacgcttcgccagcaagcgacgaatcgtcaagggggccagccaggcaccgtacattgcgaagccaaaaaccagcatcaggctggtgaaatggataaatcgcagcgcgatccaggtaaacgccagcatgatttatttcacgctaaaggtgtagtgtcctttcgttttatgcccgtccacgctaacaacatgccagtcaacggtgtaggttccgggtttcaggctatcggccagtggaacaatcagttgcttttggtcctgctcatttcgcttcgccggtaatgttttaatattttcgttttttggccccgtgatttttgcaccactgaatcctgtttcaacaccttcgctgaagtttaaagtgattgcctgcggtgcagctgtcacttgcgcgtttgccgcaggatactgatgcgttaaatgcgcatgtgcccagacggaaggtgtcaccaagctagtggtcaggattgccagcgcgtagcgaagggagcgtgcagtactagccatattatctattcctttttgtaataacttttttacagagcataaccttgtctaatgtctgagtcgaggatcatcaattccggcttgccatcctggctcactcttagtaacttttgcccgcgaatgatgaggagattaagaatgctgaagaatctggctaaactggatcaaacagaaatggataaagtgaatgtcgatttggcggcggccggggtggcatttaaagaacgctacaatatgccggtgatcgctgaagcggttgaacgtgaacagcctgaacatttgcgcagctggtttcgcgagcggcttattgcccaccgtttggctagcgtcaatctgagtcgtttaccttacgagcccaaacttaaataaaacttatacagagttacactttcttacataacgcctgctaaattatgagtattttctaaaccgcactcataatttgcagtcattttgaaaaggaagtcattatgagcttctggaaagttgcagcagcgcaatatgagcctcgtaaaaccagtctcaccgaacaggtagctcatcatctggagtttgtgagggccgccgccaggcaacaatgtcagctgttagtttttccaagcctttctttactggggtgtgattatagccgacgtgcccttcctgccccacccgatctcagtctgttagacccgctttgttatgccgcaacgacctggcgaatgaccatcattgccggccttcccgttgaatataacgatcgctttattcgtggaattgcggtgttcgcaccgtggcgaaaaacgcctgggatctaccatcagagtcatggtgcatgtctgggccgtcgttccagaaccatcacggtggtcgatgaacaaccgcaaggtatggatatggacccgacctgtagtctgtttactacagggcaatgtctgggagaacccgacctgctggcgagcgcccgtcgcttacaattttttagtcatcagtacagcattgccgtgctgatggcaaatgcccgtggtaacagtgcactatgggatgaatatggtcgtctcatcgttcgcgccgatcgtggtagtttattgttagtcggtcagcgtagtagtcagggttggcaaggcgatatcattccattacgctaagctttttcggcctggagcatgccatgttgcgcattatcgatacagaaacctgcggtttgcagggagggatcgttgagattgcctctgttgatgtcattgacggaaaaatcgtcaaccccatgagccacctggtgcgccccgatcgtcctattagtccacaagcgatggcgattcatcgcatcaccgaagccatggtcgccgataaaccgtggattgaagatgtgatcccacactattacggtagtgaatggtatgtcgcgcataacgccagctttgaccgccgcgtactgcctgagatgcccggtgagtggatttgcactatgaaactggcccgtcgtttgtggcctgggatcaagtacagcaatatggcgttatataaaacacgcaagctcaatgtacagacgccgccgggcctgcatcatcaccgcgcgttgtatgactgttatatcaccgccgcgttgcttatcgatattatgaacacctccggctggacggcagaacagatggccgatatcaccggacgtccgagcttgatgacgaccttcacctttggcaaataccgtggcaaagcggtttccgacgttgccgaacgcgatccgggctatctgcgctggttatttaataacctggacagcatgagcccggagctgcgtttaacactgaaacattatctggaaaatacttaatccgcaggcgtagcgggtaatgttccctgcgccagcgcgaccagaaaagcatattccatcgctacgccttcgtagcttttaaagcgaccagatttaccgccatggccactgtccatgtcggtacagagcaataaaagatggtcatcggttttcagctcgcgcaatttagcgacccattttgccggttcccaatattgcacctgagaatcgtgcaaaccggtcgttaccagtaaatgcggataagcctgtgcggtgacgttgtcatacgggctgtagcttttcatgtactcgtaatattgcggatcctgcgggttaccccactcttcaaactcaccagtggtaagaggaatactttcatcaagcatcgttgttacaacatcaacaaacggtacctgggcgataacgccgtggaataattccgggcgttgattaattgcaacgcccatcaacatgccccccgcactcccgcccatcgcataacaaaggctaggagagccatagcccagttttaacaatgcatcgcaggcatcaagataatcattaaacgtatttttcttcttcagaaattttccgtcttcgtaccattgttgccccagctcaccaccgccgcgaacatggacaatggcgtagacaaagccacgatctaacaaactcaagcggctaaaactgaaatcggcatcaatacttgcgccgtaagaaccatagccatacaccagcaacgggttgtgtcctttgcgaaaatgtttgcgatggtagaccaagctaaccggaacttcgacgccatcacgggcgactatccacaggtgttcactgcggtaattcgccgcataaaaaccaggaacttccgtttgttttaatacacgacgctcaccggtatccatatccagttcaaacaaagtgtctggtgtagtcatggaagaataaccataacgcaatcgcgcggtttcaggttctggattgtaggcaatccaggtcacataggccggatcatcaaaggcaataccaatgacttcccgggtcttgcggttaatttggcgcaaactggttaacccgcgctgacgctcttcaaccaccagccagtcggtaaacagcgtaaacccttccagcatgatgttttcgcgtggcggaattaactcttcccactgttgctcatcacgcatacgggtacggtataagccaaagtttttgccgtggcggttggaacgcagataaaaacgatgctggtagtgatcaaggctgtattcgtgatctttgcggcgcggcagaaaaacaaacggctcggcatcggccatttccgcgtccagcaggcgaacttcactggtggtggcgctggccaaatgaatgactacatagtgcttgctggtcgttttatgcaggctgacgtaataggtatcgtctttttcttcgtagatcagtttatcttggcttgctggcgtaccgatggcgtgacgccagacctgataaggcagcagcgtcaccggatgcttgcgaacatagtagaaaatccaggagtcatttgcccagacaaagctgggttcaacgttatccagcagttccgggtaccagttaccagtttccagattacgaaaacgaatgccgtactggcgtcgggaaagaaaatcttctgccagcgccataatggtgttatcgggcgtaatcgccattccgcccatgctataaaactcactatgagctgcgcgcttattggcatcgagcaatgtttcccactcatcccactcttcactgaatgcgctttgacgctggtagatagcatattcacagcctggttcataaatatgccgatagcggtagccatttttgatgtagggcgcagaaacttctcgttgcggaatgcggtcgatgatttcctttaagatgcgatcctgcaaggcttgttgactggccatcacccgatgaccgtaactattttcttgttgcaggtagtccaggacttctggctgagaacgcgtatcgtcccgcagccagtagtaattatcgatgcgcgtatcgccatgaagcgtcatggcgtggggaatgcgggcggcttttggtagcatgttattgttctttctggttgaaacatcttataagggtggcaaaactcaccggggatgcaagcgaaacaggggagtcattgcttagatgatgacaggtaatggcgcggatatcgaatgttatgcagacagagaaaatcagcctgttcaaatggctgtgcgattctggatagcccgaaatagtcaacttcaggctatccagagagcggaattattccgccaaagtgcgtttttgctgttcgagatcgcgttcaatgccgtcacgaacatcctgggggattttcagcgcgtcacccagtgcattcaggtaactgcgttccataaaatggtcaatatcaatagccgcgcaactcaggaaatagatttccagcgcctcttcttcattgcggaccccggtagccaggcgttgtggatccagcggttgttcgattgcctgctcaatgagtacacgcccctgctcttccacgccggctccacgcaattgctggtcgattgccgcacgttctttggcatcaatatgaccatcacttttagcggcaaagaccagcgcaaggatcaaacgtgctgtacgctcatccagcggcgtactttgcgcgccaaactgcggttcgtcctgatgcgccgcgcgaattttatctttgtatttattccacagcaccgtacccgctaccgctccgccgccaaccagtaacgcgttggtgccatatttcgtaagaagtttacgtgcacttttatttgcgaccagcagcccagccagtccgcctaatgcgcctggcactaacagtttgaccaatccctgatccgcagagctggaggtagaagaactgctttgcccaagcagggattgcagttgatttaaccagttagccatatttgctcctcaataaccatttttagtgcctgtagcatagcggatgaggatgtcagaaaatgtatatcgagacaaaagatgcgcaaataagcggggcggtaggccgttattcaaagaaattcgcgccaggtaaggtatttactgtatatcaggtgataagggtattttaggtgaaagtagtttgtcgttttgagtggcattgtttgatgctgattgcccgatgcgacgctgttgcgtcttctcaggcctacgattgtggtgcgttctggggcggacaaggcactcgcgccgcatccgccaacagtcaatcgaattatcagaagccattaacgccgctgatattccgccattcccgctttgcagtccacgctgacctggtaatgaatatcggcacttttaccacgcacggttagcggtacactccatttatcatctttaccctgaatgtcctgcaaactgacccaagccacgggatcggcctgaccgacaattttttgatcatctgcccaacgcgccacgcgattttgttgataatcacgttttacgctcgcggcaattccggcagcatccagatcttcacactttgggaaagtgacgctcttgctggtttcattattggcagcgaaaacacttgcgcaggcagaaaccaacaacagccctaaaaacgcccctctttttttcatgtttttctccatagcacaatgattcaggagaaagcatggtacaaattgtcaggagcgcaagttgcttcaggccgcgtgactggcatcttcctcttcggattcagcaccgacgacctgtggggacggtaatttgccggttttcagaatggtgctcagcacatctttttgttctgccagccataggctaagggcttcacgttgctcgtcttccatttgcactggagaatttgtcagccaggtgtcaagcagatccgccgtatcaagcattttgtcataagcatcggcttcctttttgctggtaaagctcattttctcttcgccctcacgaatgactacgtatttaacttcaaccgccatttgcagcctctcataataactgtgattttatacagtatatttcttttcggttgagaaatcaacatcagcaataaagacacacgcaaacgttttcgtttatactgcgcgcggaattaatcaggggatattcgttatgacgttattaggcactgcgctgcgtccggcagcaactcgcgtgatgttattaggctccggtgaactgggtaaagaagtggcaatcgagtgtcagcgtctcggcgtagaggtgattgccgtcgatcgctatgccgacgcaccagccatgcatgtcgcgcatcgctcccatgtcattaatatgcttgatggtgatgcattacgccgtgtggttgaactggaaaaaccacattatatcgtgccggagatcgaagctattgccaccgatatgctgatccaacttgaagaggaaggactgaatgttgtcccctgcgctcgcgcaacgaaattaacgatgaatcgcgagggtatccgtcgcctggcggcagaagagctgcagctgcccacttccacttatcgttttgccgatagcgaaagccttttccgcgaggcggttgctgacattggctatccctgcattgtaaaaccggtgatgagctcttccggcaaggggcagacgtttattcgttctgcagagcaacttgctcaggcatggaagtacgctcagcaaggcggtcgcgccggagcgggccgcgtaattgttgaaggcgtcgttaagtttgacttcgaaattaccctgctaaccgtcagcgcggtggatggcgtccatttctgtgcaccagtaggtcatcgccaggaagatggcgactaccgtgaatcctggcaaccacagcaaatgagcccgcttgcccttgaacgtgcgcaggagattgcccgtaaagtggtgctggcactgggcggttatgggttgtttggtgtcgagctatttgtctgtggtgatgaggtgattttcagtgaggtctcccctcgtccacatgataccgggatggtgacgttaatttctcaagatctcagtgagtttgccctgcatgtacgtgccttcctcggacttccggttggcgggatccgtcagtatggtcctgcagcttctgccgttattctgccacaactgaccagtcagaatgtcacgtttgataatgtgcagaatgccgtaggcgcagatttgcagattcgtttatttggtaagccggaaattgatggcagccgtcgtctgggggtggcactggctactgcagagagtgttgttgacgccattgaacgcgcgaagcacgccgccggacaggtaaaagtacagggttaaacccggcaaaaaaacgctacaaaaatgcccgatcctcgatcgggcattttgacttttacagcttagcgccttctacagcttcacgcgccagcttagtaatgcggtcgtaatcgcccgcttccagcgcatctgccggaaccagccaggaaccaccgatgcacagcacgcttttcagcgccaggtagtcacggtagttagccggagaaataccacccgtcgggcagaaacggacctgggagaacggacccgcgatcgcctgcagggctttcacgccgccgttagcttcagccgggaagaatttgaactctttcaaaccgtagtccatacccagcatcagttcggaaacagtgctgatccccggaatcagaggaatagtcccttcggtagcagctttcagcagcggctcggtcagacccgggctaattgcgaactgtgcacccgcttcagtgacttctgccagctgctgtggattcagcaccgtaccggcacccacaatcgcttcaggcacttctttggcgatagcacggatagcgtcaactgcacactcggtacgcagagtcacttccagaacgcgcaccccaccagcaaccaacgcttttgccatcggcaccgcgtgttccagtttttttaccacgataaccggtacaaccgggccggtggtcaggatactttctgcacttgttttccagtttttcatcagagttttctctcgcctgattacaaatttgtcgtcttaaaaagtgatacaggttgcgccctgttcggcaccggacagtttttcacgcaaggcgctgaataattcacgtcctgttcccacgcgactcgcgctcaggtcaggaatgtgcggttcgcgagcagccagttccgcttcgtctaccagcagcgtcagttcgcctgtctgtccattcacacgaatgatgtccccgtcgcgcacttttgccagcagcccgccatcgtaggcttctggtgttacgtggatagcactcggcactttaccactagcgccggagagtcgtccatcggtaactaacgcaattttgaaacaccggtccaataatacaccaagtggcggcatgagtttatgtaattctggcattccgttcgcttttggcccctgatgacggacaacaacgacacaatcgcggtccagcaaacccgcttcaaaggccggcataacgtcatgctggctttcaaaaacaaccgctggcgcttcaatcacctggttctcaaccggcacggcagaggttttcataaccgcacggcccaggttaccgcttaacacttttgtcccaccatgatgagagaaaggttgttcgaaggaagcgatcacattgctgtcgagacttttttccgccccttcccgccagtccagttcaccattattcagccatggttcaagggtataacgagacagaccaaaacctgccaccgtattgacatcttcatgcagcaggcctgctttgagcagttcacgcaccagaaccggtacgccacctgccgcctggaagtggttaatatcggccggaccgttcgggtagagacgtgccatcagcggtacaacatcagaaaggtcagagaagtcatcccagttaatctgaataccggccgcgcgcgccatcgccaccaggtgcatggtgtggttagtggaaccaccggtcgccagcagtgcaacgataccgttcaccaccactttctcatcgatcatcttaccgatcggcatccattcattaccattaccggtcatgcgtgtaacctgacgcgcagctgcggcggtcaaagcatcgcgcagcggagaatccggatgaacaaaagaagagcctggcaactgcatccccataaactccaccaccatctggttggtgttggcagtaccgtagaaagtacatgttcccggcgcatggtaagacgcggcttcactctccagtaaggccatgcggtccactttaccttcggcataaagctggcgaatacgcactttttctttatttggcaaaccgcttgccatcggtccagacggcacaaacaccgcaggcaaatgaccaaagctcagggctgccatcgtcagacccgggacaatcttgtcgcacacaccgaggaacagagcaccatcaaacatgttatgggacagccccaccgccgcagacatcgctatcacttcgcggcttagcaggctcaattccattccatcctgcccctgggtgacaccatcacacatcgccggaacaccgcccgcaacctgaccaaccgcattcgcttcatgcagggctttacgaatgatttctggatagtgttcataaggctggtgcgcggagagcatgtcgttataggaggtgatgatggcgatattgttacgcaacatgcttttcaaagaggctttgtcttctggctggcaggcagcgaaaccgtgtgccaggttaccgcatgccaactggctacgatgaacggtgctagttttcgcttgttctatccgggcgagataagcagagcgagtctcgcggctacgttcaatgattcgatttgttacgcgtaacaattgtggattcataaaggctcctgaaattgagttgtcagagcaggatgattcacaacgcgtttcattcagaggatttatgactgaaacgcctgtaaccggagctcatagggcaaaaacgtttcagtcagtgtaataaaaaaagcctcgtgggtgaatccgcacgaggcctgaaagtgtaaaaattgttctacaatctgcgcaagatcatgttaccggtaaaataaccataaaggataagcgcagatattactcaaactcattccaggaacgaccatcacgggtaatcatcgccacgctggcaacgggtccccaggttccggcctgatacggtttcggcgcatcattgtccatcgcccacgcctcagtaatggagtctacccatttccaggcttcttccacttcgtcgcgacgtacaaacagtgcctgaataccacgcatggtttccagcagcaaacgttcataggcatccgccagatgcgtctgattaaaggtttcactatagctcagatccagcttggtgatttgcaggttatgtttgtggtcaaggccaggaactttattcagtacctggatatccacgccttcatcaggttgcagacggatagtcagtttattctgcggcagatcctgccagctttctttaaacagattcagttcaggtgttttgaaatagaccacgacttcagaacatttggtcggcagacgtttaccagtacgcaggtagaatggcacaccggcccagcgccagttatcaatgtcgacgcggatcgccacgaaagtttctgtattgctgctcttgttcgcgccctcttcttccagatatcccggcacttttttgccctgggcgaagcccgcagtatattgcccgcgtacggttttttcgcgtacgttggagcggtcgatgcggcgcagagacttcagtactttcactttttcatcgcggatgctgtctgcgctcaggtcagacggcggagacatcgcaatcatgcaaagaatttgcagcaggtggttctggatcatgtcgcgcatctgaccggctttatcaaaatagccccagcgcccttcgatccccacttcttctgccacggtaatctcaacatgatcaatggtgcgattgtcccagttattcacaaacagggagttagcaaaacgcagcgccaacaggttcagcaccgtttctttaccaagatagtggtcgatacggtaaacctggcactcctcgaagtattcgccaacctgatcattgatttcctggctggtcgccaggctcgtccccagcggtttctccatgactacgcgtgccggtttagcattcagttttgcctcgccaagccctttgcaaattgcgccaaaagtgctgggcggcatggcaaagtagttaatggtgatacgatttttttgatccagcatcgcgccgagacggctgaatgcagcagtgtcattgacatcgagattacaaaaatccagacgtgcactcagggtgtcccataaaccttcatcaatggtttctttcatgaaagtttcgagcgcctcgcggacaactttggtatatgccgctttatcccagtcagcacgccctacgccgataatccgggtgtccgggttgagctgaccggctttttccagttgatacagggaaggcagcaatttacgacgcgcaaggtcgcctttcgcgccgaaaatgaccaggtcacaggcctgggctgtttgcgttaccgccatgtcattctccttaagttaactaacccggtacttaagccagggtatacttgtaattttcttacggtgcactgtactgcttttacgagcttgcgaaaactgtaaacgcttatccacccgtgcgattacgggaaaagcgcgcaaagtgcggcaaaactgataaaaaaatcatcgttttccattgggtaaaaatctgacactgatcatgttatgaaaaaaaataacaacttttttatctgcttttgtcattaacacggcacacaggcgtaatatctgacaaaactgcatttcgatttctttcagtgcggaaatcgtcattacccgtgagtctctttacatcatgaatatgctggaaaaaatccagtctcagctggaacatttgagcaaaagtgagcgcaaagttgccgaggtcattctggctagccccgataacgcgatccatagcagtattgctgctatggcactggaagccaatgttagcgaaccgacggtgaatcgtttctgtcgcagcatggacacgcgcggttttcctgattttaaacttcatctggcacagagtctggcgaatggcactccctatgttaatcgcaatgtcaatgaagatgacagcgttgaaagttacacagggaaaatatttgagtccgcaatggcaacgcttgatcatgtccgtcatagtctggataaatctgccatcaaccgcgccgtcgacttgctcactcaggcaaaaaaaatcgcctttttcggattaggctctagtgccgccgttgcccacgatgcgatgaataagttctttcgttttaatgttccggtggtgtactccgatgatatcgtgctgcaacgcatgagttgtatgaattgtagcgacggagacgtggtggtgctgatttctcacactggaagaacaaaaaatctggtcgagctggcgcagctggcacgcgaaaacgacgccatggtgattgccctcacctctgcgggtaccccgctcgcccgggaagcaacgctggcaattaccctcgacgtaccggaagatactgacatttatatgcccatggtttctcgacttgcacagctgaccgtgatagatgtgctggcgacaggatttactttgcgacgcggtgcaaaattcagagataacttgaagcgggtcaaagaagcgctgaaggaaagccgttttgataagcagttacttaatttaagtgacgatcgctaaaaacgactgtcactgtcctaatcttatacgacatccgaatgagattaatttatcgccatcgcggcgttatttcattcggatttcatgttcaagcaacacctggttgtttcagtcaacggagtattacatgtccagaaggcttcgcagaacaaaaatcgttaccacgttaggcccagcaacagatcgcgataataatcttgaaaaagttatcgcggcgggtgccaacgttgtacgtatgaacttttctcacggcagccctgaagatcacaaaatgcgcgcggataaagttcgtgagattgccgcaaaactggggcgtcatgtggctattctgggtgacctccaggggcccaaaatccgtgtatccacctttaaagaaggcaaagttttcctcaatattggggataaattcctgctcgacgccaacctgggtaaaggtgaaggcgacaaagaaaaagtcggtatcgactacaaaggcctgcctgctgacgtcgtgcctggtgacatcctgctgctggacgatggtcgcgtccagttaaaagtactggaagttcagggcatgaaagtgttcaccgaagtcaccgtcggtggtcccctctccaacaataaaggtatcaacaaacttggcggcggtttgagcgctgaagcgctgaccgaaaaagacaaagcagacattaagactgcggcgttgattggcgtagattacctggctgtctccttcccacgctgtggcgaagatctgaactatgcccgtcgcctggcacgcgatgcaggatgtgatgcgaaaattgttgccaaggttgaacgtgcggaagccgtttgcagccaggatgcaatggatgacatcatcctcgcctctgacgtggtaatggttgcacgtggcgacctcggtgtggaaattggcgacccggaactggtcggcattcagaaagcgttgatccgtcgtgcgcgtcagctaaaccgagcggtaatcacggcgacccagatgatggagagtatgattactaacccgatgccgacgcgtgcagaagtcatggacgtagcaaacgccgttctggatggtactgacgctgtgatgctgtctgcagaaactgccgctgggcagtatccgagtgaaaccgttgcagccatggcgcgcgtttgcctgggtgcggaaaaaatcccgagcatcaacgtttctaaacaccgtctggacgttcagttcgacaatgtggaagaagctattgccatgagtgcaatgtacgcagctaaccacctgaaaggcgttacggcgatcatcaccatgaccgaaagcggtcgtaccgcgctgatgacctcccgtatcagctctggtctgccaattttcgccatgagccgccatgaacgtacgctgaacctgactgctctctatcgtggcgttacgccggtgcactttgatagcgctaatgacggcgtagcagctgccagcgaagcggttaatctgctgcgcgataaaggttacttgatgtctggtgacctggtgattgtcacccagggcgacgtgatgagtaccgtgggttctactaataccacgcgtattttaacggtagagtaagtacgttgccggatgcggcgaaaacgccacatccggcctacagttcaatgatagttcaacagatttcgaatattctgaagcaaacttgaacttatcatcaggcgaaggcctctcctcgcgagaggcttttttatttgatgggataaagatctttgcgcttatacggctggatttcgcccggtttgcgagttttcagcaattttagtatccaggtgtattgttctggtcgcggaccaacaaaaatctcgacttcttcattcatccgccgcgcaatcgtatgatcatccgcctctaacagatcatccatcggtgggcgcacctgaatcgtcagacgatgcgtcttgccatcataaatcggaaacagcggtacaacgcgcgcacggcacactttcatcaaacgaccaatcgcgggcaacgtcgctttataggtggcaaagaaatccacaaattcgctgtgctctgggccatgatcctgatcgggtaaataatatccccagtacccctgacgtacgctctggatgaatggtttaataccgtcatttctcgcatgcagacgaccgccaaagcgacgacgcaccgtgttccagacataatcaaaaaccgggttgccctgattatggaacatcgctgccattttctgcccttggctggccatcagcatggcaggaatatcgacggcccaaccgtgcggcaccagaaagataactttctcgttattacgccgcatctcttcgatgatctccagcccttgccagtcaacgcgcggctgaattttctccggcccgcgtattgccaactcagccatcattgccatcgcttgcggcgcggtggcaaacatctcatcaacaatcgcttcgcgttcagcttcactacgttctggaaagcagaggctcagattgattaacgcacgacggcgactgctttttcccagtcgtccggcaaaacgtcccagccgtgccagaatgggatcacggaactttggcggcgttaaagcgatacccgccatcgctgctacgcccagccatgctccccagtagcgcgggtggcgaaaggatttatcaaactcaggaatgtattcgctattattttttttcgtttccatgcttttccagtttcggataaggcaaaaatcaatctggtgatagtgtagcggcgcaacttgccccgcaccaaataaaaaaagccggtactgactgcgtaccggctgcgaatggatgttaattaatcaaaccgtagctgcggcacaatctctttggcctgcgccaggaattcgcgacgatcggagccggtcagcccttcggtacgcggcagttttgccgtcagcgggtttacggcctgctggtttatccatacttcatagtgcagatgcggcccggtactacgtccggtattaccggaaagcgcgatacggtcgccacgtttcaccttctgtcccggtttcaccagaatcttgcgcaagtgcatataacgcgtggtgtagctgcgaccatgacgaatagccacataataacctgctgcgccactgcgtttggcaaccaccacttcaccgtcacccacactaagcactggcgtaccctgcggcatggcgaaatcaacacctctgtgtggtgcaacgcgaccggtcaccggattagtacgacgcgggttaaaattagagctgatacggaactgtttcgccgtcgggaatcgcaagaatcctttcgccagaccagtaccgttacgatcgtagaatttgccatcttcagcgcggatagcgtaataatctttaccttcactacgcaaacgtacgcccagcagctggctttgctcacgtttaccatcaagcatttctcgagacattaacaccgcaaattcatcgccttttttcagtttgcggaaatccatttgccactgcatggctttaatcactgcgctcacttcggcgctggttaaaccggcgtttctggcgctggcaacaaagcttcccccgacggtacctttcagcagattgttaacccactctccttgctgcatttcgctggtcattttaaaaccgttagcggcagtacggtcataggttcgggtttcacgacgagacacttcccaggtgaggcgctgcagttcgccgtccgcggttaatgtccaggagagttgttgaccgattttcaggttacgcaattctttgtcggccgcagccagttgggtgatatcacccatatcaataccatactgattgagaatgctgcttagcgtatcgccagtggaaacaacatattcatgcacgcccgcttcaccggcgattttgtcatccagttcgtcctggggaatggcttcatcttcttgtgcagcttgatcaatcggctcactggcttcaggtaagaggctacgaatttcgttctgttccagctcaatggttttgacaattggcgtggcatcacggtgataaacataaggccgccagacagcgacggccagagtaagaacggtgaggctccccaacataacgcggtgtggtcgcggtaaattattaaacgccagggcgacagagcgggctatctgttgcacgtaatcacttcctcattaatctcctttcaggcagctcgcatactggttggctaattgactcaggaattcactatagcttgttttacccagtttgatattcgtccccaggggatccaacgttcccatacgaacggatgtccctcgtgcgacgctctcaacgaccgctggcctgaactgtggctcagcaaaaacgcaggttgctttttgctcaaccaactgtgttcttatttcatgtaaacgctgcgcgccaggttgaatctcagggttaacggtaaaatgaccaagcggtgtcagtccaaactgtttttcgaaatagccgtaagcatcgtgaaaaacgaaataacctttccccttgagcggcgcgagctcgttaccaacctgcgtttcggtactggctaattgtgcctcaaaatccttcaggttggcgtcaagtttggctcgactttgcggcataagttccactaattttccatggattgcaaccgctgtagcccgcgctatctctggggaaagccaaagatgcatgttgaaatcgccgtgatggtgatcttcgtcacttttttccgcgtggtcgtgatcatcatcatcgccgtgaatacttttcatcagtagcggtttcacatcttcaagctgcgcaatcgttacctgcttcgctcctggtaatttgcttaccggtttttgcataaacgcttccatctccgggccaacccaaacgactaagtccgcgttctgtaagcgttttacatcgcttgggcgcagactataatcatgttcactagcgccgtcaggaagtaaaacctctgtttctgttaccccatcagcaatggcagaagcgatgaacccaacgggtttaaggctagcgacaacggcggcatctgcggcctgtgttgcacctccccagagagcggcggataatgctgcgaaaagaagcgtttttttatgtaacataatgcgaccaataatcgtaatgaatatgagaagtgtgatattataacatttcatgactactgcaagactaaaattaacatgacaagtctggtttccctggaaaatgtcagcgtttcttttggccaacgccgcgtcctctctgatgtgagcctggaacttaaacctggaaaaattttgactttacttgggccaaatggcgcaggtaagagcacactggtacgggtagtgctcgggctggtaacacccgatgaaggggttatcaagcgcaacggaaaactgcgcatcggctatgtaccgcagaagctgtatctcgacaccacgttgccactgaccgtaaaccgttttttacgcttacgccctggtacacataaagaagatattttgcctgcactgaaacgtgtccaggccgggcacctgattaacgcaccgatgcaaaagctctctggtggcgaaacgcagcgtgtactattagcgcgagcattgttaaatcgcccgcaattattagtgctggatgaacccactcaaggcgtggatgtaaatggccaggtggcgttatatgaccttattgaccaactgcgtcgtgaactggattgtggcgttttaatggtttctcacgatctgcatctggtgatggcaaaaaccgatgaagtgctgtgcctgaatcaccacatttgttgttccggcacaccggaagttgtttccctgcatccggagtttattagtatgtttggtcctcgtggtgctgaacaactgggtatctatcgccatcatcataaccatcgtcacgatttacagggacgaattgttttgcgtcggggaaatgatcgcagttgatttaacgtcggggaaatgatcgctcatgattgaattattatttcccggttggttagccgggatcatgctcgcctgtgccgcgggtccgctgggtagctttgtagtctggcgtcgtatgtcttatttcggtgatacgctggctcatgccagtttacttggcgtcgcgtttggtttgttgctggacgtgaatccattctatgcggtgattgccgttacgctgctgctggcgggcggtctggtatggctggagaagcgtccacagctggcgatcgacacgttattagggattatggcgcacagtgccctgagcctgggcctggtggtcgtgagtctgatgtctaatattcgtgttgatttgatggcttacctgttcggtgatttgctggcagtgacgccagaagatctcatctctattgcgattggcgtggtcatcgtggtggctattttgttctggcaatggcgcaatttgctgagtatgacgataagcccggatctggcgtttgttgatggtgtgaaattacagcgagtgaaattgttgttgatgctggtgacggcattgacgattggtgtagcgatgaaatttgtcggtgcgttgattattactagcttgctgattattcctgctactactgcgcgtcgctttgcccgcacgccggaacagatggctggtgtcgctgttttggtggggatggtggcagtgactggcggtttaaccttttccgcggtttacgatacgccggcgggtccgagcgtggtgctatgtgcggcactgttatttattctcagtatgatgaaaaagcaggccagctaatctatcgctgaacacatttgtcggatgcggcgcgagcgccttatccgacctacggttcggtatctctggtagtcctggtaagacgcgaacagcgtcgcatcaggcatattgccagtgccggatgcggcgcgagcgaccaatccgacttacggcatttctggcggcgttatgccaaagtgattccacgcccgcgtcgtcgccatacgcccacgcggtgtacgctgcaaaaagccttgctgaatcaaataaggttccagcacatcctcaatggtttcacgttcttcgccaatggctgccgccaggttatccagacctacaggtccaccaaagaacttatcgattaccgccagcaacaatttgcggtccatataatcgaaaccttcagcatcgacattcaacatatccagcgcctgagcagcgatatctgcgctgatggtgccatcgtgcttcacttcggcgaaatcacgcactcgacgcagcagacggttggcaatgcgcggcgtaccgcgagcgcgacgagcaacttccagcgcgccgtcatcactcatctcaagccccataaagcgtgcgctgcgactgacgatatattgcagatccggcacctgataaaactccagacgttgcacaataccaaaacggtcgcgcaacggacttgtcaggctacctgcgcgcgtggttgcaccaatcagggtaaacggcggcaaatcaattttaatggagcgtgccgccggaccttcaccaatcatgatatccagttggtagtcttccattgccgggtacagcacttcttcaacaactgggcttagacggtggatctcatcaataaacagcacgtcatgcggttcaaggttagtgagcatcgcagccaaatcgcccgccttttccagcaccggaccagaagtcgtgcgtaaattaacgcccatttcattggcgacaatgttggcaagcgtagttttacccaaccccggaggaccaaaaatcaacaaatgatcgagggcatcgccgcgcagtttcgctgctttgatgaaaatctccatctgactacgaacctgcggctgaccaacatactcttccagtaatttggggcgaatggcgcgatctgctacatcttccggcaaagtggtaccggcagaaatcagacggtctgcttcaatcatcctttacctcataacgcggcgcgtagggcttcgcgaattaaagtttcactgctggcgtcagggcgagcgattttgctcaccatgcggcttgcttcttgtggtttatagcccagcgccaccagcgcggcaaccgcttcttgttcagcatcgtcggtcgccgggctggcaggagacgtgagtaccaggtcggcggctggcgtaaagagatcgccatgcaaacctttaaatcggtctttcatttcaacaatcaagcgttcggcggtttttttgccaatacccggcagtttcaccagtgcccccacttcttcacgctcaacggcattaacgaactgctgcgcactcattccggagaggatcgccagcgccaacttcgggccgacgccgttggttttgatcaactctttgaacaatgtgcgctcttgtttattgttaaaaccgtacagcagttgcgcgtcttcacgcaccacaaagtgggtgaaaacgatcgcttcctgacccgcttcagggagttcataaaaacaggtcatcggcatatgcacttcatagcctacgccgcccacttcaattaacaccagcgggggttgtttttcaatgatgatgcctctgagtctgcctatcacatgacgctcctgcgtaatgaatcaaagataatgctgtatgataaaaaaatgctggatagatatccagcgaaggatgaagaaaacttgcgaggtgtctcgatgaactgaaaaatggcacagtataatttattctacaggttatattggaagcaaatattttaatattacatattcagtgaagaaatgcgtaataaaaatatacattgcgcctcctgaaaaaataaattttttatgctattacgtatatttgtatctatttcaatggaatgacaacgtgaatattaattaccctgctgaatatgaaattggagatatcgtctttacatgtataggtgctgccttatttggtcaaataagtgctgcaagtaattgctggagtaatcacgtcgggatcattatcggtcataacggtgaagacttcctggttgcagaaagccgggttccccttagtaccatcaccacgctatctcgttttattaaacgtagctctaatcaacgctatgctataaagcgattagacgctgggctgacagaacgacaaaaacaacgaattgttgaacaggttccctcccggctacgcaaactttaccacaccggttttaaatacgaatctagccgccagttctgtagtaaatttgtttttgatatttataaagaagcgctatgtattccggtgggtgaaatagagacgtttggagaattgttaaatagcaatccgaatgcaaaactcactttctggaaattctggttcctgggttctattccgtgggagcgtaaaaccgtcacgccagccagtttgtggcatcatccgggtttggtgttgattcatgcggagggagtggaaacgcctcagccggaactgaccgaggcggtataacttaacgcagtcgccctctcgccaggttcagccggctttcgctcatctgcatcgcattctgactaacgtggcagtgggtgatagcaatcgccagcgcatcggcggcatccgcctgtggattagcgggcagtttcagcaaggtgcggaccatatgctgcacctggcttttttcggcactgccaatacctaccaccgtttgctttacctgacgtgccgcgtattcaaatactggcaactcctgattcaccgccgccacaatcgccacgccgcgcgcctggcccagtttcagggcactgtcagcgttctttgccataaagacttgttcaatggcgaaataatcaggctggaactgggtgatgatttccgtcacgcccgcatagatgagtttcagacgagacggtaaatcatccactttggtgtggatgcatccgctacccaggtaggacagttgcctacctacctggcggatgacgccgtagccggtcacgcggctacccggatcaatgccgagaataatagccatcacgcgtctccgttttgctgtttagcaggcctcatcagagagtcgctgcgacctcatcagagatttcaccgttatggtaaacttcctgcacgtcgtcgcaatcttccagcatatcgatcagacgcatcagtttcggtgcggtttctgcatccatatcagctttggtagacgggatcatggaaacttccgcgctgtctgctttcagacctgccgcttccagagcgtcgcgcactttacccatttcttcccatgcagtgtagacatcaatcgcgccgtcatcataggtcacaacgtcttcagcacctgcttccagtgctgcttccatgatggtgtcttcatcgcctttctcgaaggagatcacgccttttttgctgaacagataggcaacggaaccatcagtaccgaggttaccgccacatttgctaaatgcatgacgcacttcagcaacggtacggttgcggttgtcagacagacattcaatcatgattgccgtgccgccaggaccgtaaccttcgtagatgatggtttccatgtttgcatcatcatcaccgcccacaccacgtgcaattgcgcggttcagtgtgtcacgggtcatgttgttagacagtgctttatccaccgccgcacgcagacgcgggttagcgtccggatcgccaccgcccagcttagccgcggttaccagctcacgaatgattttagtgaagattttaccgcgcttagcatcctgcgcagctttacgatgtctggtgttggcccatttactatgacctgccataaaaatatctccagatagccctgcctgttcaggcagcgttaattacaaactgttcaatcgcctgccggttgctccaggacttagtgagcgccgccgcagcaggcgcatcaagccacttgtaagccagatgttcagtgaaaacgatctgccgctcgtgcggaagcgcaagacagaaccaactttccgtattacgcgtcacgcccggcgcatagcgatgacgtaaatgactaaaaatttcaaactctaccgtgcgctgacagtcaattaaggtcagttgttcagcgacaacatcaatggtgacctcttcctttacttcgcgcatggcagcttgcggcgcggtttcaccctcttccacgctgccggttacgctctgccagaaatcgggatcgtcacgccgctgcaacatcagcacccgtttcgtatcttgtgcgtagatgaccactaagatgctaacgggacgcttatacactttatccttcacgctgcctcttcgttgactgccttcgctcatcccattcacatagttatctatgctcatgggagttcactcagttgccgcctcgatgcaacgcgaatgatttcgtgtatttgagtcatatcagttattctcagccttcttcacaacctgaatgctcagctcagccagtgcagtcgggttagcaaagctcggtgcttcagtcatcagacacgctgccgccgtggttttcgggaaggcgataacgtcacggatattgtcggtgccggtcagcagcatggtcagacggtcaagaccgaatgccagacctgcgtgcggcggagtaccgtatttcagagcgtcgagcaggaagccgaatttctcgcgctgttcctcttcgttgatacccagaataccaaacaccgtctgctgcatatcaccattatggatacgtacactaccaccgcccacttcgtaaccattgatgaccatatcgtaagcgttcgccaccgcattttccggtgcagctttcagttctgcagccgtcatatctttcggactggtgaacggatggtgcattgccgtcaggccgccttcaccgtcgtcttcaaacatcgggaagtcgataacccacagcggtgcccatttgctttcgtcggtcagaccaaggtctttacccactttcaggcgcagtgcacccatcgcgtcggcaacaattttcttgttgtcggcaccgaagaaaatcatatcgccatcttgcgcggcagtacgatccaggatgtcttcgatgatttctgcattaaggaacttcgctaccgggctgttgataccttccagacctttcgcgcgttcgttaactttgatgtaagccagacctttcgcgccgtagattttaacgaagttaccgtattcgtcgatctgcttacgggtcaggcttgcgccgcccggaacgcgcagagccgctacgcgacctttcggatcgttcgccggacctgcaaatacagcaaactcaacagatttcagcagatcagcaacgtcagtcagttccatcgggttacgcagatccggtttatcagaaccataacggcgttctgcttccgcaaaggtcattaccgggaaatcgcccagatccacacccttcacttccagccacagatgacgcaccagcgcttccatcacttcacgcacttgcggcgcggtcatgaaagaagtttccacatcgatctgagtaaattcaggctgacggtcagcacgcaggtcttcgtcacggaagcatttaacgatctgatagtaacggtcaaaaccggacatcatcagcagctgtttgaacaactgcggggattgcggcagtgcgtagaatttacctttgtgcacacgagaaggcaccaggtagtcacgcgcgccttccggcgtggctttggtcagcatcggagtttcgatgtcgaggaagccgtggtcatccataaaacggcgcaccaggctggtgattttagcgcgggttttcaggcgctgagccatttccggacgacgcaggtcgaggtagcggtatttcagacgcgcttcttcggtgttgacgtggttagagtcaagcggcagaacatctgcgcggttgatgatagtcaggctggacgccagcacttcgatttcgccggtcgccatatcgcggttaatatttttttcgtcacgcgcacgtacggtgcccgtgacctgaatgcagaactcattacgcagttcagaggccagctttaacgcgtccgcacgatccggatcgaaaaatacctgcacgataccttcgcggtcgcgcatatcgatgaagatcaggctaccaagatcacgacgacggttgacccaaccacacagagtcacctgctgccccacgtgggacaaacggagctgtccacaatattctgtacgcatgagatatcccttaacttagctgccggcggatgccccctgctgcgcaggtgaccaagtcgcagcgttagctgtatgtcacaactgaatgaaaaaaggcggctattatactggaaattctgccgcaccgtaagagcctggcccgcgctggaacgcctcgttaccactttatatcgggcctgaaatcagactctacgccagtttgctataaaggtgttgcccgaactcataaaaattaacaaaatttgtcgttccgccatcggctaatcgcattaaggtgtgaggcacgattttgttttttcaggagtcattatgcttgaacttaatgctaaaaccactgcgctggtggtgatcgatttacaagaaggcatcttaccttttgccggtggtccacatactgccgatgaggtagttaatcgcgccgggaagctggcggcgaaatttcgcgccagcggtcagcccgtgtttctggtgcgcgttggctggtctgccgattacgctgaagcattaaaacagccggtcgatgcgcccagtccggctaaagtgttgcccgaaaattggtggcaacatcctgctgcattaggtgcaaccgacagcgatatcgaaatcatcaaacgtcaatggggtgcgttttacggtacggatctggagttgcaattacgccgccgaggtatcgatacaatagtgttatgtgggatcagcaccaatatcggtgttgaatccaccgcccgcaatgcctgggaacttggctttaatctggtgattgccgaagacgcctgtagtgccgccagcgccgagcagcacaataacagtatcaaccatatctacccgcgcatcgcccgtgtgcgtagcgtggaagagatcctcaacgcgttatgatttacatcggtctaccgcaatggagccatcctaaatgggtgcggttggggatcaccagccttgaagagtatgcccgccactttaactgcgtggagggcaacaccacgctttacgccctgccgaaacccgaggttgtcctgcgctggcgtgagcagaccacagatgacttccgcttctgttttaagtttccggcgaccattagccatcaggcagcattacggcattgcgatgatttagtgactgaatttttgacccgcatgagtccgttggctccgcgcattgggcaatactggctgcaactgcctgccacattcggcccacgggagctgcctgcgctttggcattttctcgattctcttcctggcgaatttaattatggcgtggaagtccgccatccacagtttttcgccaaaggagaagaggaacaaacgcttaatcgcggtttacatcagcgcggcgttaatcgggtgattttagacagccgcccggttcatgcagcacgtccacacagtgaagctattcgcgacgctcaacgaaaaaaacctaaagttccggtacatgctgtactgacggcgacaaatccgctgatccgttttatcggtagtgatgatatgacgcaaaaccgggaattatttcaggtctggttacaaaaattagcgcagtggcatcagaccactacgccttatctttttttacatacgccagacattgcccaggcaccggaactggtacataccctgtgggaagacttacgtaaaacgcttccagagatcggagcagttccggctattccacagcaatcttctcttttctgaatttgccacctatcatagacaggtgccatcggccattttaaagggagtttgtatggtaagcgcgctgtacgccgttttaagtgcgttgttattaatgaagttctcttttgatgtcgttcgcctgcgaatgcagtaccgcgttgcctatggcgacggcggttttagcgaactgcaaagcgctattcgcattcatggtaacgcggtggaatatattcccatcgcgattgtgctgatgctgtttatggaaatgaatggcgcagaaacctggatggtgcatatttgcggcatcgttttgcttgctggtcgtctgatgcattattacggttttcatcaccgtctgttccgctggcgacgttccggcatgagcgccacctggtgtgcgctgttgctgatggtgctggcgaatctttggtatatgccctgggagttggttttctccctgcgttaacgcacaatacgccactttctttttcccggatttttacgttatgtctcaccgcgacacgctattttctgcccctatcgccagactgggcgactggacctttgatgaacgggtagctgaagtcttcccggatatgatccagcgttccgtacccggctattccaatattatttccatgattggtatgttagccgagcgcttcgttcaacctggtacgcaggtttacgatctgggttgttctctgggcgcggcgacgctcagcgtgcgtcgcaacattcatcatgataattgcaaaattattgccatcgacaactccccggcgatgattgaacgctgccgtcgtcatattgacgcctataaagcccctacgccagtagacgtcattgaaggtgatattcgcgatatcgccattgaaaacgcaagcatggtggtgctgaattttaccctgcaattcctggaaccttccgagcgccaggcgttactggataaaatttatcaagggctgaaccccggcggcgcgctggtgcttagcgaaaaattcagtttcgaagatgccaaagttggtgaactgttgttcaacatgcaccacgactttaaacgtgccaacggttacagcgaactggagatcagccagaagcgcagcatgctggaaaacgtgatgctgaccgattccgtggaaacccataaagcacgcctgcataacgccggttttgagcatagtgagctgtggttccagtgctttaactttggtagtctggtggcattaaaagcagaggacgctgcatgatcgactttggtaacttttattctctgattgccaaaaatcatcttagtcactggctcgaaacgctgcccgcgcagattgctaactggcagcgcgagcagcagcacgggttgtttaagcagtggagtaatgcggtggagtttctacctgaaattaaaccgtatcgtcttgatttattgcatagcgttacggcagaaagcgaagagccactgagcgcagggcaaattaaacgcattgaaacgctgatgcgcaacctgatgccgtggcgcaaagggccgttcagtctgtatggcgtcaacatcgataccgaatggcgttccgactggaaatgggatcgtgttctgccccatctttctgatttaaccggacgcaccattctggatgtcggctgcggcagcggttatcacatgtggcgcatgattggcgcaggcgcgcacctcgcggtggggatcgaccctacgcaactgtttctgtgccagtttgaagcggtgcgtaaactactgggtaatgatcagcgcgcgcatttgttaccgttaggtattgaacaacttccggcactgaaagcctttgataccgtctttagcatgggcgtgctttaccatcgccgtagtccgctggagcatctatggcagttgaaagatcaactggtcaatgaaggtgaactggtgctggaaacgctggttattgatggtgatgagaacacggtgctggtaccaggcgatcgttacgcgcaaatgcgtaatgtctatttcatcccttccgcgctggcgctgaaaaactggctgaagaagtgtggttttgtagatatccgcattgcggatgtgagcgttaccaccacagaagagcagcgacgcaccgaatggatggttaccgaaagcctggccgatttcctcgacccacatgatccgggtaaaacggtggaaggttatccggcacctaaacgcgcggtgctgattgcgcgcaagccgtaaaggtctggtattactgccggatgcggcgtgaacgccttatccggcctacaaaaccttgctaattcaatatattgcagggactatgtaggcctgataagcatagcgcatcaggcagctttacgtttgcataacctcagcgcccgtttccgggcgctattcacgtcttacgcctgaacagctggctgatcaaacgccgttaacttcggtgcattgcccgtatatttttcgatatacaccaacgcactgttaccggcacaggcatttgccagctggctgctggggatatccgccgttaacacgttcgcactgccgtttttacacaagccattttccagatctggccatgcaccttcatgcacgcataccacgccttttttgatcccgtcagtcaccaccgcgcctgtcaaaatctgaccacgtttgttccagacacgcaccagatcgccattcgcaataccaaagcgtgcagcatcttcggtgtgaatagtgattggttcacgatcggcgatcgcatattttttacgcagttccgcatagttaagctgactgtgtaaacggtgtgccggatgtgcggtcagaagctgtaactgcttctcgtcggcggtacctttccattcatcaggagccagccaggttgggtgtgccgggcaatccttatagccaaatttttccaacgttttactatagatttcaattttgccgcttggcgtacccagcgcatttttcaccggatcggcgcggaaatcaccataacgaacgtactgttcgttcttctcgctgtggcgcatttcgatcagtttattttgctgccagaaggcattaaacattggcatagtgacgcgttgcgcacgggcacctttctgagcggcatcatagaaaaatttcagccacgccatttcatctttaccttcggtatagatctcttttccgccaggtttgagtaattccgcaagatcggcaaacacgtcaaaatcgttacgcgcttcaaattgcggagcaacagcctgcttcatcggcacaatatgctggttgctgtaatcaccggtcatcgtcaagtcattgcgctcaaagcttgtggtgatcggtaatacgatatctgcgtgtttggctgctgcggtccagtagcattcagaaacgacgatcatctccggtttctgccatgctttaatcagacgattagtatcctggtgatgggtaaagttaccgccacccgcccaccagatcattttgatattcggatacgtttgttctttaccgttatgctgatatttgccgccaggattttccagcgcatcgacgatacgggcaacaggaatcgccgtcattccgccatcatcagcggcctcgctggcatgtccggcaatcgccgcagacatttccggcagcacgccgccaacacgcgtcgggttgccaccgttggagtaatgataagagaaaccaaaaccgccgcccggtgtaccaatctgccctaacatcgccgccagcgtcaccagcatccagtgtttctgttcaccatattgctggcgctgaattccccagcctgccatcagcattgtgcgattcgccgccatcagttcagcgagtttgactatctgcgcttccggtacgccagtaatttccgccgcccagaccgcgctcttcggcgtattatcgctcttacctgtcagatactcttcaaactgcggatacccggtagtgtatttttcaaggaacactttatcgtgtttgccttgtgtcatcagggtatgcgcaatccctaacatcagtgccacgtcggtgcccatattcggcgcgatccaggtggcattatcgtcaaagaattcgatggtttcggagcggataggatcaatggcaatcactggtttgccagattttttcagctgatggaagtattccagcccttgctcatcggtactgctccaggcaatttttaaggtattcagcgggttcattccccacagcaccacaacctggctgttttccagaatcagcggccaggaggtctgctgttcatacacctctacagaaccgaccacatgcggcatgatcacctgtgctgccccggtactataatcgccgctatgcccggaataaccgcccgccaggttcatataacgttgcagtaaggtttgcgctttatgcaacacgccagaagagcgccagccgtaagatccggcaaaaatggcgcttggtccgttagctttacgaatacgatcatgttgctcatgaatcagttttaatgcctgttcccagctcacctgtacataggtatcttcgccacgacctttcgccggttgcagtggattatcgagatagctttttctcaccatcggatgctgaatacgcgccgtggtgtgtacctgatccgccgccgtagactgtaaggaattcggtatggttttcgccagcgcgcctgtactagaaacaatcttgccgtccttcacttctacgttcatcgctccccaacgtcccgcggtgaggattttaccgcccttctcttctgcccatgcggggagcggtgctgcgcttgtcaccaccagcgctccagcggcaataccgctgtgtttaataaattcacgtcttgttaatgtcataacttcctccctgatcaacgaggatcactgtttctcggtaatatctttggcgttgtactggaaataccgcgttaaaatgtccagttcgttttcgctcatgctggttcgtgcccccattcctttggcaatggacggccacgcattgacggtgtaatggtcggcggcaataggggcatgacaaccagcgcaataggtatcgtcaagtttttcagcgtattgccatagcggtttacggtccgctaatgcgggatcggtaagcgcaccctgtaaagacgcctgacgccattgattgccgtattcgtcagcctgccattccccgtttacagtgagcgccttgataccttcttcacttaatgtggctagcgccagccgttgacctgccgccaggtagagcgtgttttcactgccctgcatttgataaccctgcaacagaacgatcggctgtttgccactggcatcaacgacggtgagatcggttccaggattcacggtagccagctcgcctatgtgagaagttttgaaaggataaatatgtgcgccattagtaacactagtagcggcctgactttccagctcatgcgccgcgttgtcatccatttttatttctggcggaaaatgggcaatgcctttatgacaatcgatacaggtttcgctgtccttttgtgctttgttatgcattttctgcgcagattcactttggctggcaatatccatggcatcaaaagaatggcaactacggcacgttgcagagtcagtggcttttaattctttccatactgtttcggccatttcctggcgatgagcttcgaacttatcgtcactgtctattttgccgctaacaaattcatgataaatatctttagatgcctttaatttagcaaataaataatccatcccactctttggaatatggcaatcggcacattccgcacgtatccctttctggttgctaaagtggacagttccctgatattcctcaaaaggtttactcatgctgtggcaggaaaggcaaaatgctgtatcgctcgttttatgtaagactttttgcgccagcaataacccgccgccaccaaccacaaccgctatcagcaaaaacaataacccaatgcgttttttccctcgcatagattcctctaattaaattactggacaccgaaatcattgtataattaaatatacaacgaattaaccgcttgcataattaggcacaacactgcctgaaacaatcgataaagaatatgatttattacaatgtaatcattaattgctaaggaataacccagttgctatttagaatatatatttatcagttttagtaatttaaatcccataattaatgtgaatatatacaatatttttagcacaacgctatgcgcactgtcacccgctcaacagatcacggttatcgttcgttttttatactgttcagggataaaaaaaggcccctgttgaaattgcaggggcctggtacgagcaagcatcatattgggcgacatgatgcaacggtaaaaatcatttggcctgatggcgttcaatgattcctttcatttcagcaaccgccgccccgtctacgatataacggctatactcgtccgcgtgttcatcactactcatggacaatccttgattacgataacgcatcggactggcttgccacgctcccgcggagctatggacttccagcactccggcatcgaggaagtggtgcaggttttctgcacggactcctgctccggccataatgattggagcatcacgatgggcaataagttccataattttacttaaaccttgcagtgcgtcacttttttgcccacttgtcagtacccgggcaatgcccaattccgcaagattattgagtgtatataaagggttagcgcacatatcgaaggcgcgatgaaaagtcactgccagcggaccggcagcagccattattttttccattcgtggcatatcgacattcccgtcaacatcgagaacgcccgtcaccagtccaggaaaacctaattcgcggaccgtgcgcacatcctcaagaatggcggcaaactcaccgtcgctgtagcaaaaatcaccaccgcgtgggcgaattatcggatgcacagggatcgtcacccgctggcgcacggatttcagtacacccaagctcggcgttaagcccccctcttttggggctgcgcataattcaactctgtctgcgccgttttgctgcgccgttagtgcacattccatgctgtaacagcaaatttccagtaatgccatttttactccttaattacgcgctctgctcgctggcaacgatctcttcaatggaccacggatgaaacttaatagttgttttgccatcggtgaccgccagcgtcggattcggtaatcgctcatgctcaccttttgggctactggttttcacactgatccccggtaggctgagtccttcatcagaaagcaatgccagcgcacgggcattcagcgtttctggatcacccggcagaacgatttcaatatgttcccaaccttcgtgtgggtaacgtttttccccgggccacggtagctccacaatagaaaactgccagtgcgcaacctgtaccggttcatgcaatttaaacagacaaatcggtctgccattgatcatattttcactcaaaagctcgccacactgttcaaacccgcgacgccagcgttcagcagtggcgttttgatggcaacgcaaagaaatgtgatcggcagtcagcggagtgatattcaaccccagacggcgggaaagttcatctaatgcgtggataaatcgcggtaaatcgcttgcaatatcctgcagctcgtcgatagattgccagttcgccataatcactcttcgtctttcagtaaaagcgttaatttaccctgttgccctgtgccaaccaaccgctgatttcacgccgcttctgatgcaatagtgaaaacggcaatacgccacgcgcacgttgctgacgaaaacagccatttgcagtatactcccgccctaatttctttaactggtgcgggcaatttttgctcgcttcatcaatgtaaggtattccggtgaatattcaggctcttctcagtgaaaaagtccgtcaggccatgattgcggcaggcgcgcctgcggattgcgaaccgcaggttcgtcagagtgcaaaagttcagttcggcgactatcaggctaacggcatgatggcagttgctaaaaaactgggtatggcaccgcgacaattagcagagcaggtgctgactcatctggatcttaacggtatcgccagcaaagttgagatcgccggtccaggctttatcaacattttccttgatccggcattcctggctgaacatgttcagcaggcgctggcgtccgatcgtctcggtgttgctacgccagaaaaacagaccattgtggttgactactctgcgccaaacgtggcgaaagagatgcatgtcggtcacctgcgctctaccattattggtgacgcagcagtgcgtactctggagttcctcggtcacaaagtgattcgcgcaaaccacgtcggcgactggggcactcagttcggtatgctgattgcatggctggaaaagcagcagcaggaaaacgccggtgaaatggagctggctgaccttgaaggtttctaccgcgatgcgaaaaagcattacgatgaagatgaagagttcgccgagcgcgcacgtaactacgtggtaaaactgcaaagcggtgacgaatatttccgcgagatgtggcgcaaactggtcgacatcaccatgacgcagaaccagatcacctacgatcgtctcaacgtgacgctgacccgtgatgacgtgatgggcgaaagcctctacaacccgatgctgccaggaattgtggcggatctcaaagccaaaggtctggcagtagaaagcgaaggggcgaccgtcgtattccttgatgagtttaaaaacaaggaaggcgaaccgatgggcgtgatcattcagaagaaagatggcggctatctctacaccaccactgatatcgcctgtgcgaaatatcgttatgaaacactgcatgccgatcgcgtgctgtattacatcgactcccgtcagcatcaacacctgatgcaggcatgggcgatcgtccgtaaagcaggctatgtaccggaatccgtaccgctggaacaccacatgttcggcatgatgctgggtaaagacggcaaaccgttcaaaacccgcgcgggtggtacagtgaaactggccgatctgctggatgaagccctggaacgtgcacgccgtctggtggcagaaaagaacccggatatgccagccgacgagctggaaaaactggctaacgcggttggtattggtgcggtgaaatatgcggatctctccaaaaaccgcaccacggactacatcttcgactgggacaacatgctggcgtttgagggtaataccgcgccatacatgcagtatgcatacacgcgtgtattgtccgtgttccgtaaagcagaaattgacgaagagcaactggctgcagctccggttatcatccgtgaagatcgtgaagcgcaactggcagctcgcctgctgcagtttgaagaaaccctcaccgtggttgcccgtgaaggcacgccgcatgtaatgtgtgcttacctgtacgatctggccggtctgttctctggcttctacgagcactgcccgatcctcagcgcagaaaacgaagaagtgcgtaacagccgtctaaaactggcacaactgacggcgaagacgctgaagctgggtctggatacgctgggtattgagactgtagagcgtatgtaatcgatttttcgtgagagtgaagcctgatcagggttagccgatcaggcttttttattgccatctaaatgtattctgaaaatggacatgccattgttttctcactgttggataagaggccagaagcgtaatatccggccccagggaaacgataacggttgaatttaaggaataccgcagtgtttaaatttcttgtattaacattaggcattatctcttgccaggcttacgcagaagatacggttatagtaaacgaccatgacattagtgccatcaaagattgttggcaaaaaaatagtgatgatgatactgacgttaacgtgatcaaaagttgcctgcgacaagaatacaatctcgtcgatgcgcaattaaataaagcctatggtgaagcttatcgttatatagaacaagtgccacgcacaggtgtaaaaaaacctgataccgaacaacttaacttgcttaaaaaaagtcagcgagcctggctggattttagggacaaagaatgtgaattaatccttagtaatgaggacgttcaggatttaagtgacccttattctgaaagtgaatggctcagttgtatgatcatacagaccaatacgcgaactcgccagttgcagctataccgtaactctgaagatttttatccaagccctttgacaagaggataattcacatctttttggcatgttttgttgcaagctattcctgataaataattgcaacaagacatcgagcctttttcactgagttattaaacatactcgcgagcgcgtcgctacgctagcaagcaaaaatgaaacaggaataatcgaaatgggatgttgcgcacagtcaaaataactcaccgtaaataatcatctgctataaataatcactttcatgcaataccagataagctatttttaaacagacacttaccgcacaacaaactaattaaatacaaagaaaggcaacaatcaacttaatgttaatgaaatgttttacatatattaaccacttgtttaatgcggagaatcagtacactattttcttataattacatttgaaattatatgatcaccgggagtgattgattaattatctttactaataatcagactaatatttacctgtttgaccgagttgggattgcgtcgtttctccattaggagtaaagctttaatgtcacctgaagttcacagaataaggaacaggttatgagctatagcaatattcttgtcgctgttgcggttacaccggaaagtcagcaactgctggcaaaagcggtatctatcgccaggccagtaaagggacacatcagtttaattactctcgcttccgacccggaaatgtacaatcaattagctgcgccgatgcttgaagatttacgcagcgtgatgcatgaagaaacgcaaagctttcttgataagttaattcaggatgcggggtatcccgttgacaagacgtttattgcctacggtgagttaagcgaacatattctggaagtatgtcacaagcatcatttcgatttggtgatttgcggtaatcacaatcacagtttctttagccgagcatcctgcagcgcgaaaagagttattgccagtagtgaggtcgatgtgctgttagttccacttacgggagattaaccgctcttacgcaagctttggaaaggtagcaactttatcgcgctgctggctttccgcgcttcgcggaactatctgctttaggtcgctaatgaagcactcctgccagtggttaatatcgtttttcacgataacgtccagcatttctgcatgacgggaaatacgttccgccaggctcatagtcaatgcacgatccagcgcagctgcaacttcgtcacgatcgtaggggttaacaattaacgcgctcgttaactcgtttgccgctcccgcaaattggctaagaacaagaacgcccggattggctgggtcctgagcagcaacatactcttttgctaccaggttcatcccgtcacgcagtggcgtcactaagcccacgtcagagtagcggaatattttcatcagtaatttacggtcaaaatgctgattcaaataataaagcggcgtccagcctaattgcccgtatttaccattaattcgtccagcttcattttcgagctgatgacgaatatcctgataggcttgcacatcaccacggctcgttggtgcaatctgggtataacgaattttaccatgatgctgcggatatttttccagcaacgcttcataggcgagaaaacgctctggcaaacctttggaataatccagccgttcgacagaaaagatattttgtacgtttttcagttccgctttaagttgcgccagttttggcggcagtggcccggcagcctgtttggctatttctttcggttcaatgccgatcgggtagacttctgttcgaaatgctttgccccaggctgtatggctttttgcgctacgtgtcgtgacgcgggtcaggttagaaagacaatccaggaacgccagacgatcgttttctgtctggaaacccagcaaatcataatcacaaagctgttcaagcaaggtgtcatatgtcggcagcgcgttgaagatttccggtgtcgggaaaggaatatgcagaaagaaaccaatgcgattattcactccccgtttgcgtaattcatgcgcaaatggcaacaggtgataatcgtggatccagataatgtcatcgtcttgcaacagcggcagtaatttatctgccagcaacgcatttacgcgtagatagccgtcccaggcaggacgctgaaattgcaccagatcgagccgataatgaaaagcgggccagagaacggcattggagaattggttgtagtattcgtcaaggtcctgttcgctgaggttaaaagaggcccacgtaatgttaccttttttcaccttttttagcggctgatcctcattccctgtttcaccactccagccaaaccacagtccgcctgcggctttcagtgcccccagtatgccaacggcaaggccaccggcactggcggcgtgctcgtctggtggtgcaatccggttagatactacgactaaacgactcatagtcatcactcctgttatttttacttagatactacgactaaagctctcatagtcatcactcctgttattttctcttttttgttgtaatgcggtggttatcatttcaagccagctccagacatccggcacacccgccagtcgccaacttgcctgagttgcacctgtgccaatttttacactcattccgcccagtcggttaacgactgcgaagccagattcatcggttaaatcatcgcccagaaatacgggcgttcgcccgataaagggagcttcctgcataaaagctgcaattgcctcacctttactggtacctctcggtttgatctcgacaacacactttccctgctgtaacgccatttgtggccagatctgagtaatacgttgcgctaatgtcattaatgcgtcttcatgctgcggagcctgacgataatgcagcgcaaaagccatccctttcgcctccagctccgcgccgggatactgagcgatgactgtatgcagttgcacgctaatatcacgcgcaatcgcatccggcagatgaacgatatgtgttttaccattgatgtcacggcgctccgccccatgcacgcccgctaacgggaagcgataaggttttgccagtgcgtcaagctccaccatactgcgcccacttatcaatgccaatgcaccatcacttgcggttgccagtagctgtagtccttgcagaatattgtcaggcacgacgacctgatcgggatgcggtttgatttccgccagcgttccatcaagatcaaaaaaccaggcatatttcgcggatagttcaggggtttcggttaacggttctgtcacccggttctcctccttctcttttcttattgtgttgcgcagaacgcgctttacagacatgtaagtatagacagtgtgacgggggtcgccatttgcaacgaagaacagccaaccgttatggcggttggctatggtgggaaaaaacgctaaattgttgcagaaaaaagcatcagacagtgcgtttcgctttttgcttgtaacggtcgaagatcaccgctgccagcaggattaagccgcgaaccacgtactgcgcgaaaggagaaatattaagcaggttcatggcgttttccacggtgcctaaaattaagatacccgccaccacataactgatttttccgatgccacctttcagagaaacgccacctaaaacgcaggcggagataacaatcagctcataaccaatgctcgtcattggctgcccactggtcatacgactagccagaataattccggctatcgcacttaccaggccactgagaacaaagataataattttggtgcgaacaaccggtacacccgccagacgcgcggcctcttcgttcccgccaatcgccagggtgttacgaccaaaggtggttttattcagcagcaaaccaaagataatcagacacgcgacggtgagccagattggcgcaggcagaccgaaccagttggcgtaaccaagggcaaagaagctttcatcttcgataccgaccgctttaccgtcactaatgatgtacgccagacctcgaacaatctgcatcgttgccaatgtcgtgatcagagcatttattttcagtttggcgataacaaagccattgaccaggccacagagaacgcccagcaacaaccccgctgccacgccaatccacaggctttcagtcaggttaataaccaccgccgtggtgacacccgcacaggcaattacggaggcgacagaaaggtcaaagtcaccggaagcgaggcagaacaacatgccacaagccaccatcccgctcatggaaattgccaggcccaaccctttcatattaatgaaggtggcaaaatttgggacaaaaatggcacaggcgataaagagcaccgcaaacaccaccagcatgccgtactgatcccagatacgcccgaagctgaaactgctcttaggtgcgccagacccgcttgtagaaacagaagacatcatactctccttactcaggcaacagcctggctgactttaggcatcgcaaggctcagtgcctgacgctcatctgcctgctcgtgtaacaattcaccggcgatttcaccttcccgcatcaccacaatccggtcggcaacgccgaggacttcaggtaagtcgctggaggcaaacagcaccgccacgccctgcgccgccagcgcataaattacgttatatatttcgtgcttagcgccaacatcaatgccgcgcgtaggttcatccagcaaaatgaccttcatctcttcgcttaaccagcggcccagaatggctttttgctgatttccgccactgagattcatgatcagttgctccgcgcccggcgttttgatgttgaggctacgaatgtggtgatcggcattgttttcttcccaaccgttgttgattacacaaccgccgagcacatgtttacgtctggcactgatgttgatattgtcgcgaacggagtgcacgggaataatgccttccgctttgcgatcttccgggcagagcatcatgcctgcggcaatggcgtggctcggtttacgaatatcgatcggctgttggtcgatataaacctgaccggcggtgatttgcgtcccgccaaacatgcctttcattaattcgctacgccccgcccctaccagaccaaacagcccaacaatttcaccactgcgaaccgccagacttattggcgtacgcacgcctggtgctttcacagcatcaagacgtaggcgctcctcgccataactacgcggttgccagccgtagatatcgccaatgtcgcgcccgaccatcgcctgcaccagcgcgtcgtggtcaacctgctacatatcggtaaaggttttgacataacgtccatctttaaagacagtaatggcatcgctgagggcaaatatttcttccatacggtgagaaacgtataagattacccgcccctcttttcgcagttcacgaataacgcggaaaagattgtcgatttcacgggcagagagggagctggttggctcatcaaaggcgataattttggcgttacgcgccagcgctttggcgatttcaaccatctgccactgaccaatggagagatatttcagcggcgtgtccgggtcaatatccataccaagatgtttaagttgtaaacccgcctcataattcagcaaactgcgattcacaatgccgcctttatgcggcagctggccgagatagatgttttccgcgacggtcatttccggcacgagatgcagttcctggtaaataatcgccacgcccgcgttaagtgctgcggtcgtgtcggaaaaggacatttcctgcccattaatcactacagaacccgtggttggcgcatagttgccgctgaggatttttaagagagtactttttcctgcgccattttcacccatcaacgcatgaacctgaccggcatagcagtcaaaactaatatccgtcagcgccttaacgccgggaaacgttttaccgatgccgcgaaaactgagatacggggtagactgttgcataacgtctccgtgaatcactggtcgttcacaccccctctgcatcatgcagaggggaatttttccggcaaattacttaccgcctaaaccttttttctccagttcttctttaaagttgtcacgcgtgatcagtaccacgtcggtaacttcggtaaattttggcggttcaacgtcttttgctacccagttgtaaagcatttcgctggatttatagccatgtacgtccgggcttggcagcagggaaccgtagaagccggttgcctgtgctttagacagttcgctcaccgcatccacaccgttaatgccaatgccgatgatatcggccgctttaaagccctgaccttccgtcgcgcgtacgccgcccagcacggtgctgtcgttcataccgacgatcagccaatgtttaacttccggatgttgaaccagcatactgttggcagcgtcaaatgcccccgggatgtcgttagatttggtaggtacctgataaatttgtttttccgggaatccggccgctttcagcgcatccatagatcccgtagtacggcggcgggcggtatccagttcgttggcggtaatcgccatcaccgcgctttctttgacatcccagccacgtttctgcatctctttatacagttcctggccctgacgttcgccaattttagtcgccgccatcatcaccagcggaacggtatccattggcttacctttggcgttaacaaactggtcatccacggcaatgactttcatatcgtagccacgcgctttcgcgacgatggcagagccgagtttggggtccggagtacaaataacgaaaccttttgcgccactggcagccaggctgtcgatcgcgttcaatgttttttcgccatccggcacggcaatcttaataacctcaaaccctaaatccttcccggctttatcggcaaacttccattcggtctggaaccacggctcttccggttgcttcaccagaaaaccgagcttcaggttctccgccatagcggattgactcataacggctgccagaccaatggctgccagggctttagtaaatttgtgcatggttctctccagctttagtgtcgttttgtgtagggcaaaaacgaatgacattcgttaaattaatcggaaaacaaagcattaccttttaactaaaagataagtgactgtgttgacatagttttagcgagaaattaattctccataggagagcaatatcacatcgcagaattacagtgagaacgtgcataaatttagcgggaaaagacataagggaaagccaatttgtcagacaaattgtcgaatgcacagcagattaatccataagattagcctggaaatccttgttgtctttggtacccatgcgggatgtcttctttttaaccagtcaataggccgcattacctggcgttgagtttttgaaatggtgtaataaccgcaactcaaagatgtggaaaatgcacgtcattcatttcgtcattaattatcactgtgctcattaattaacagaacacgtataatgagagccatctcgcaaaaatgaaaaaacgttttataaaatcatcacttcatcatgaattcaaattcattgattaatatcaacaagatacaaaaagcactatcattaaaattcattgcagttacattgatttcatcaatgaaatgtaaaaatatataaacttgatgatttaagcattttcttatacccgttcagacgttattcttatttcagatcatcgtcagaattgactccacgatcacatttcggaccggcagaaaggaattattctgcaaacagtaattatggtgttttgatttatcttgcacctctccacttctggatataaggatattaggtatggcaaccgctggaatgcttctcaaactcaactctcaaatgaaccgcgagttttacgcatccaatctctaccttcacctgagtaactggtgttctgaacagagtctgaacggcaccgccactttccttcgcgcccaggcacagagtaatgtgacccaaatgatgcgcatgtttaactttatgaagagtgtcggcgctacccccatcgttaaagccattgatgttcccggtgaaaaactgaactctctggaagaactgttccaaaaaacgatggaagaatacgagcaacgttctagtacgttggcacagttagccgatgaagcgaaagaactgaatgatgatagtaccgtcaatttcctgcgcgatctggaaaaagaacagcagcatgatggtctgttgctgcaaaccattcttgatgaagtgcgcagtgcgaaacttgcgggtatgtgccctgtgcagaccgaccaacatgttctgaatgtcgtgagtcaccagctgcattgatcatcatcggcgctaatgcattgcgccgatgaaggttttgagaaaccgctgcctcatctgtttgaagcagcggtttttttaatgggattcaccctgtggggtaaacttgagttcaataagcgcgatggctttttggattgcccgcatggtgaccgggtctgcggcggcgggatggttagtaaagtcgatattcttcagctgactggacattttttcacgaacttcaacgggcgcgattacatcgagaacatccagaatttgtttgataaccaactggcaagcaaccacatcagaaaccaattcctgatcggcattcagcggctgggacatcgtaaactcctgatagcattttgaaagccgttatagtagcgacttcacatcttcagcgatagtcacatccaccgtcatcaggacacaaaaaaacctgccggagcaggttttttgttatcggaacatattgcctggcggtacgtctttgaacgtcttgcaatagttattgaacatacttttcaggattttgcgcagtttcatcgcggcactccgaccatttgttatacaggtgttattgtctttgcgcttataatatgacaaccatcacaaaaatcaatctttatgtgatacaaatcacataaatacccctttaatgttataaaaatgataatcaaaaaacagcccccctatttctgacacctacagatggcaagaaatagcgcctgccaggcgtcttttccggccattgtcgcagcactgtaacgcgtaaaatagtgctttctcttactcttctggctggaccatgagacttctgattctgactcttagtttaataacgctggcggggtgtacggttactcgccaagcccatgtgagcgaagttgacgcggcaacaggtattgtacggttagtttatgaccaggcttttttgcagcatgcccataccgatcgttatgtcagtcgcgggatcgccgatcgcgcatgccagcaggaaggctatacccacgcggtcccctttggtcagccagtaggcaactgtagcctttttgcgggttccttatgtttgaatacggaattcactttgagttatcagtgccatcattccgccttccctgtctttctctaaatattttaatcagcgaggggatcttcgctgattaaagaaatagcggtaatgcgttttattcccattcgtatttttaataattgaagtttatattttaccttttgcaaataataaaataacaaattatagtgacgccacagcaacaaatataacctttgtggagcactatcatgctgaaaccagaaatgattgaaaaacttaatgagcagatgaacctggaactgtactctagtctgctttatcagcaaatgagcgcctggtgcagctatcataccttcgaaggtgctgccgcgttcctgcgccgtcacgcccaggaagagatgacgcatatgcagcgtctgtttgattacctgactgataccggcaatttaccgcgtattaataccgttgaatctccgtttgctgaatattccagtcttgatgaattattccaggaaacctataaacacgaacaattaatcacccagaaaattaacgaactggctcatgctgcaatgaccaatcaggactacccaacatttaatttcctgcaatggtatgtttctgagcagcatgaagaagagaaactgttcaaaagcattattgataaattaagcctggcaggcaaaagcggcgaaggtctgtattttatcgacaaagaactctctaccctcgacacacaaaactaatgctctccggcggcaggtttactgccgccgtttcaaatcagtgacggcaaatcttactctgatcggtgctaaaaccgtctttgctaggtataaatttgccttttgctgccagaaacgctaccagctctcccgctgtcatcccttctgcgctgcaggtgtgaaaacgtgcctgttcaccaaaacgcgctttaatcgcagcttccagactggcatgcgtatattgctcgccactttcaatcatcatatttaacacttcatgaccgtgaatagagtccatcgtccctcctcaaaaaaagcctagcgtagcgattgccgcttatgaagactttgcgccagcgcaggactgaatgctttttattgtacatttatatttacaccatatgtaacgtcggtttgacgaagcagccgttatgccttaacctgcgccgcagatatcactcataaagatcgtcaggacagaagaaagcgtgaaaaacagaaccctgggaagtgtttttatcgtggcgggaaccacaattggcgcaggcatgctggcaatgccgctggctgcggccggtgttggttttagcgttacgttaatcttgttgattgggctttgggcgttgatgtgctacacggcgctattactgctggaggtgtaccagcatgttccggcagataccggtctgggcacgctggcaaaacgctatctgggacgctacggtcaatggctgacgggcttcagtatgatgttcttaatgtatgctctgactgcggcatacatcagcggtgccggtgaattgttggcctccagcatcagcgactggacaggtatttctatgagcgcaaccgctggcgtgctgttgttcacttttgttgccggtggcgtggtttgtgtcggaactagtctggtcgatttatttaaccgttttctgttcagcgccaagattatttttctggtggtaatgctggtactactgctgccgcatattcacaaagtgaatcttttaaccctgccgttgcaacaggggctggctctgtctgcaatcccggtgatttttacgagctttggttttcacggtagcgtgccgagtattgtcagctatatggatggcaacattcgtaagctacgctgggtgtttataatcggtagtgcgatccccctggtggcatatattttctggcaggtggcgacgcttggcagcattgatagtacaacctttatgggattgctggctaatcatgctggattaaacgggctgttacaggcgttacgcgaaatggtggcctctccgcatgttgagctggcagtgcatttatttgctgatttagccctcgccacgagttttctcggcgttgcgttaggcttatttgattatctggctgatttatttcagcgtagtaataccgttggtggacggttgcaaactggtgcaattacgtttctgccgccgttggcgtttgcactgttttatccacgaggatttgtgatggcgctgggttacgccggtgtggcgctggcggtactggcattgattatccctagcctgttgacctggcaaagcagaaagcacaatcctcaggcgggttaccgggtcaaaggtggtcgtccggcgctggtggtggtgtttctctgtggtattgctgtgattggcgtgcaatttttgattgcggcagggttgttaccagaagtggggtgatcagatagcctcaaattccttattgggtgccagaattaacgctgacacccaatttggcctcttaatgcaggcagcactgcttaaatttcttaccactaccgcacgggcaaggatcgttacgccccggtttctcttctgctttgatcggttgctgaacagctttttcctgcggatgcgccatccagtacgcatgtagatcaagcgccgccagtcgaatggcatctacgctctcttcaaacgcttctgggctcatcttttctacccgctcgaagttttcctcagtaccgtgcagcgcaatcgcctccagcgctggttttaagctatcgggcaacgtactccagtcagaaagtgccacgccccgcatatagccaaagcaccactcctcaacaatcgtcagctcgctgccatcaacttctcgcaagccgaataacggctcaaactgctccgggaattcgttcagacgctctgcggtatcggccatatgttgaaaagccagattcataaagcgcgtcatctctttctcactcgcccagcgcggcacatagtcagccccaccccacacggcaaccagccactgttccggttcaatctcttgcggagaactcaacaccgccgtcaataaaccgtccagctccgccacatcaaggatggcgtggtcagtgttgtatttggtcagaatatcgtccagccattccaactcactttcgtttaacggtcccgttttcatacgcttttccttgtggatctcaactcgccagcacctatcttacatgccggtccgtatcagagatactttttgagtggctttgctggtgattaaaaattaaggagggtgtaacgacaagttgcaggcacaaaaaaaccacccgaaggtggtttcacgacactgcttattgctttgattttattcttatctttcccatggtacccggagcgggacttgaacccgcacagcgcgaacgccgagggattttaaatcccttgtgtctaccgattccaccatccgggctcgggaagaaagtggaggcgcgttccggagtcgaaccggactagacggatttgcaatccgctacataaccgctttgttaacgcgccaaattcttcaggcctttcagccagacatccgcttgacgccgatgtcttttaaactggagcgggaaacgagactcgaactcgcgaccccgaccttggcaaggtcgtgctctaccaactgagctattcccgcattcatcaagcaatcagttaatcacttgattttattatcgtctggcaatcagtgccgccgttcgatgcgttgcattctacttacctggcgcgatgagtcaacgatatttttcaccacttttgatcgtttgctgaaaattacgccgaaacgatcactgatcaagcaaatctgcacgcgcagcgctcaaatattgcaacatactccacagagtcagtaccgcagccacaaagaaaagtgcaataccggcgtactcaacccaaatgttcggacgccacagcagccatgccaacgccaccatctgggcagtggttttcactttcccaatccaggagacggccacgctactgcgtttacccaactccgccatccattcgcgtagcgcagaaataataatttcacgggcgatcatcgttgccgccggtaatgtcacccaccagctgtgataatgctcggttaccagcaccatggcgatagccacgagaactttatctgccacagggtcaaggaaagcaccaaaccgggtactctggttccagcggcgtgccagaaaaccatcgaaccagtcagtcaccgccgcgacgcagaaaatgagcgcggcggcaaacgggctccaggtgacaggcagataaaagaccaatacaaagaatgggataaggatgacacggaacagtgtaagcaacgtagggatattaaattgcataatgacgggtaactatctgttgtcagtaagattacccctatgttgctacagagacatcaatgtttcaagctccagaagatcttttctgccagaccttggctaatacccggcacttttgcaatttcctcgacgctggcgttacgtaaaccttgcaaaccgcccatatatttcaacaacatttgccgacgttttggcccgacgccttcaatggtttccagggaactggtatttttgaccttcgcccgttttttacggtgcccgccaatcgcgtgatcatgactttcatcgcgaatatgctggataacatgcagcgcgggactatctggcggcaaactaaatccctcaccttccggctcaaagaacagcgtttccagtccagccttacgatctgctcctttggcaacgccaagtagcagcggatgatttttatcccaactgacatccagttcggcgaagacatttttcgcctgcgcaagctggcctttgccgccgtcgataaggatcacatccgggatcttactgtcgtcaatggctttaccataacgccgacgcagcacctgattcatcgccgcataatcatcgcccggcgtgatgcctgtaatgttatagcgccgatactccgcacgcagcgggccgttagcatcaaacaccacacaggaagcgacggtttgttcgcccatggtatggctgatgtcaaagcactccatccgcttcacttccggcaatttcaacacgctggcaagcgcggtcagtcgctggtgaacggtagattgctggctaagtttgctggttaaggccgtcgccgcattggtgcgcgcgagtttcagataacgcgccctatcgccgcgaggtttggtttgaacattaatcttgcgtcccgccagttcactaagggaatcggcgagcagcgttttatcgctaagattaaaatcgagcaggatctcacccggtaaggtgcgcatctggctgccttgtaaatagaactggcctacgaaggtttctaccacctcgctcagttccgtaccgccaggcactttcgggaaatagctgcggctgccgagcactttgccctgacgaatgaacaatacgtggacacaagccatgcccgcatcgaacgccacaccaataacgtcgaggtcgtcgccggtattggaaacgaattgtttttcggtgacgcgtcgcaccgcctgaatttggtcgcgaatacgtgcagcttcttcaaactccagattctggctggcagtttccatacgactaatgagttgcgtaagcacctgatcatctttgccagacaaaaacaggcgcacatactcgacctgctgagcgtattcttcttcactcaccagtccttcaacgcacggtcccagacagcgccctatctggtattgcagacacggacggctgcgattgcgataaacactattttcgcactggcgaatggggaaaatcttttgcagtagcgccagtgtttcacgtacggcatagccattcgggaacgggccgaaatattcacctttggcatgcttcgcaccacgatgcatcgccagacgcgggtgggtatcaccactcaggaagataaaaggataacttttatcatcgcgtagcaaaacgttgtaacgcggctgatagagtttgatgtagttgtgttccagcaacagcgcttcggtttctgtgtgagtaaccgttacatcaatttgctggatctgggcgaccagcgcttcggttttgcggctagcgaggttgctacggaaatagctggaaagccgttttttcaggtctttcgctttgccgacatagataaccgtaccaccagcatcgtacatgcgataaacgcctggctggctggttacggtttttaaaaacgcttttgcgtcaaactgatcactcactgactacttaatgtctccgcattacacagaccatggcgaattgccaggtgagtcagctcaacatcgccatgaatgtttagtttactgaacatacgatagcggtagctgttcaccgttttcggactgagattgagctgttcactgatctcattgaccttctggcccttggtgatcatcagcataatctgcaattcacgttcagacaaactggcaaatgggctttctgttttttctggttcgatctggcttaacgccatttgttgagcgatgtcagaagcaatgtaacgctgcccactatagacagaacgaatcgcactcacgacttcctgcggagccgcgcctttgctgaggtagcccgcagcaccggcctgcatgactttcgctggtaaagggttttctgtatggacggtaagcatgatgattttgacatcagctgtggaacgcgcgattttacgcgtcgcctcaagaccgccaatgcccggcatactcatgtccattagcaccacgtcaacggcatttgtccggcaccacttaacggcgtcttcaccgcagcttgcctcaccgacgacttttataccctttatatcttccagaatgcgtcgtatccctgcgcgcaccagttcgtggtcatcaacaagtagaacgttgatcaaaggaatatctccagaaatagggataacgctactgatagttagtcattcgtatattagcggtttttattgcaactttgaaacgttaaaaatggtgggtattcgatttttctctcgtttttgtcaattcgattgtccacagttatggtcacgcccgtcaccaacggcttaccggatcgtttcacagtaagccctacgatgaaatgtgacaaaaattgactttattcagcaaaaatgaaaatcagcccgctgaatatgtaacattaattaacccgaacaatacgggcaaaaaacattcatgataaaaatatttattggtcattatattaacgtattttatagcactgccgatatcacgctcaaaaaacaaccactgctatttttagcaaagcttatggtatactccgccgccttaacatttttcaccgcaaattttcattgcaacatgacgaggaaaataaatgagtacgcctgatttttctactgccgagaataatcaagaactggcaaatgaagtctcctgcctgaaagcgatgctgacgctgatgctgcaggcgatgggacaagctgacgcgggccgcgtgatgttaaagatggaaaaacagcttgcgctgatcgaagacgaaacccaggctgcagtattttccaaaacggttaagcaaattaaacaagcctaccgtcagtaatataaaaccggctgatagcgtgcctttcagccggtttttgcatctggcacgcaggacagaaaagagatcaaattaagccagtagcggccgcgtaacaggcaacctgggtcttatttggtgcattaatttttttctgcatgtttttctggtggaaattgaccgtattctcagagatactcaaaatcatcgctatctctgcacttgttttcccttccgccgtccacctcagaatttctttttcgcgcttgctgaaattcatctctggcgtcatcactatttcatcatttaaacgcatcagagccatcagactttcgcgcaccagtaactgcatttttaattgcagttcatcactaagaatgggtatttcgcgcgcgctgcaacgggaaaaggacaaaaagcccagcgcccggtttggcagcattaaatactgagtgacaccgcggcgtaaaccatgtgcgcgcgcggcttcccataacggctgtgcttcgctgaataagtcatcattccacattaaatggccctgactaaagttttcagggttcagcaccggatcaattgcgagaaagttttttgcctgataataactaacccacgcctcagggtaattggtgtaaaaagccactttaggtcgagtgaatggtaccgggtggcggacacataagctatagtaatcgtactccagctgctgagcctgaagctcaatttcatggtagacctcttctgcggtctccatcctctgaaaacgcaacagcatcgtgcgacgccagctgaaaaaatccttatcctgcatagtaaaccgcaacgcccttgagagtgagtatcatttataatgataattcaaactatcacataaataagatttatatataatttatattattcaggcaatgaattacttttgcaagccatcgcattctcttatgttattaatgagttatgctgatttgttaagcagttttatcaggcttgaaatggcgtccagccccgacaggtgaatcgtcggggctgattttttcttattattgcagcagaaacttctcgaggaactggcgggtgcgaggctgctcggttccgtaacgtttatcatgttatcctaaggattatccgaaaaataatacctacgaacatcttccaggatactcctgcagcgaaatatttgttttaagctcactcacatatcgcaacatttactttactttaagacaattccaggcaaattatacaacactttacgggatagtaagtccgcctgaaaaatcgcgagagtggcgcattaggtgacccatgttgttccgtttagtcatgatgaaatattcaggtaaggggaattatcgttacgcattgagtgagggtatgccatgagtacgattattatggatttatgtagttacacccgactaggtttaaccgggtatctgttgagtagaggggttaaaaaaagagaaatcaacgacattgaaaccgttgatgaccttgccatagcttgtgatagtcagcgccctagtgtggtgtttattaatgaggactgtttcatccacgatgcttctaacagtcagcgtatcaagctcatcattaatcaacatcccaatacgttatttatcgtttttatggcaattgccaatgttcattttgatgaatatctattggtcagaaaaaatttattgatcagttctaaaagcattaaaccggaatctctcgacgatatccttggcgatattctgaaaaaagagacaacgataaccagctttttaaatatgccgacgttaagtttgagccgaaccgaaagcagtatgttgcgaatgtggatggcaggtcagggaaccattcaaatctctgaccaaatgaatatcaaagccaagaccgttagtagccataaaggtaatattaaacgtaagatcaaaacgcataataaacaggttatctaccatgtcgtccgactgacggataatgtgactaatggtatttttgtcaacatgcgctaacacattctgactggtggtttcccaccagtcaggctgaataagattactctgctttctccacaaagataccgtcctgatgccctgcttcattaaagaaccagatgccgagcgggtagtcttccaggctaaccaggtacattgtgccttcactaaactcctcaactgccagtaccacgccaggacgacgcggaccgccatccgttttgactgttacccgatcattcaccttcatcgttttcctcctgtggctttgtgccagtgtagaacaatttcgtttttctggcagcgccaggcgcgcgcgagtgctgattttctcgacggtctatacttaagagatgccaggcggacttaacgactggcggcaacaacagagtaacggttgcgaggaaagatgatgaaaaccgcaaaagagtacagcgataccgcaaaacgtgaggtcagcgtcgatgtcgatgccctgctggcggcgatcaatgaaattagcgaaagcgaagttcatcgcagccagaacgattctgaacacgttagcgtcgatggacgtgaatatcatacatggcgtgaattggcggatgccttcgaactggatattcatgacttcagcgtctctgaagtgaatcgttgaatgcacaataaaaaaatcccgaccctgagggggtcgggatgaaacttgcttaagcaagaagcacttaaaaaattcgttacaccaggaaatctgatgtgttcatcaccttatccgcaatttttttcgctgacaagaaaatattcgccatatgaatgattaacgctacttatgaatagaaatgtgacgcacgtcaccccttggtggctctggcgtcagcgggatcgctcccgaaaaaatcatctttgataatttgtgcggttttgagaatcatcctggtaagaggagtactgcgcgactatgtttagtattcaacaaccactactggtttttagcgatcttgatggcaccctgctggacagtcatagttatgactggcaaccggcagccccctggctcacccgtttacgcgaagcaaatgttcccgtcattctctgtagcagtaaaacaagtgcggaaatgctgtacttgcaaaaaacgttggggctacaaggtttaccgctgattgccgaaaatggcgcagtgatccagcttgctgagcaatggcaggagatagacggttttccacgcatcatcagtggtattagccatggcgaaatcagcctggttttaaatacgctacgcgagaaagaacattttaaattcacgacttttgatgatgtcgacgatgcaaccatcgccgaatggacgggattaagccgtagccaggcggcgctgacgcagcttcatgaggcgagcgtaacgctaatctggcgcgacagtgacgagcgtatggcacaatttaccgctcgtctgaacgaactgggcttacagtttatgcagggtgcgcgcttctggcacgtactggatgcttctgccggaaaagatcaggctgccaactggattatcgcgacctatcaacaattgagtggcaaacgcccaaccacacttggcctgggcgatgggccaaacgatgcgcccttactggaggtaatggattacgcggtgattgtgaaagggctaaatcgtgaaggggtgcatctgcatgatgaggatccggcccgcgtctggcgaacgcagcgtgaaggaccggaaggatggcgtgaagggctggaccattttttctccgcccgttaagcgttatcgctcgcgaatacccgattacgcccagcctgtttagcgagataaagccgacggtcggccagactctggagttgttcaaaatcataatcaccggtttcctcgctgctgcttacccccaggctggcactgatgcgtatcgtcgtactcttggcgatcaacatctctttttcatttaatttcagtcgaatacgttctgcgacctccgcagcctccgtcagactcgcgcctggcagaatcacacaaaactcctcaccaccgacccgcccggcaacgtcctgcgcacgcaaggaactgctaattaatccggcagcatgagaaagaacacggtcgcccgcctgatgaccaaagcggtcattaatcgctttaaaatggtcaagatcgacctgaatgacagaaaaaggatgttggtgcgtctgacacaatttagcgagcggacgggctttttcgaacagtgcgccacggttatataaacgcgttaaggtgtcgtgccacgcctgccactgcaagctgctttgcagaacatacatgttgctaaccatccggcgaatcacataccaggagatgagtaacatggtggtaaagagcgcccacagcagggttaatgcaatgctgatactgccgaaatcgccgcgcacgccttcgcttaacgtatggacacgcaccagcacaccgtcgaaatggtccagacgttcccagctaacatagcgactgtccatacgaatgccgccccgcgtgtcatgttccattgcctgcgccagcaaggccagttcacgaggatcaaaaatattccctgttggatggtcaggattggaagaggtcaaaaatctcagcttactgtcatagagctgatactcaccatcgaggtttttatcgatggcgtttcttaaaaattgctgcatagtacgcacgggaatactcatccccagcacgccataccagtagttattactgtctaccggaacactgacggtaacctgcggttcagtattgctggcgtgttccggttggctagtgaaccagcgtaccgcgcggtgacgattttctcgttgactatggccaataaaccagggttgggtgacatagccgtaataacgcgttggaacattgcgcgtaaacaaggtcggctgcgtgctaacgtaaaatccggcacggctgacatacatcgcctgttcaaccatgctgctggagttgtgcgctagtcgcagcaagtaaccaacttccagtgcagcggtaatttcattgtcgaggctttcattttcgcgagacaggagattcccctcgctgactaatgcatcgctcacaccattaactggcagagtgcgtcgtcggttgagttcgattttccaggcgtgctcgtcgcgatgctgttcgaactcggttacagcatcacgcagagaggtgaaatccagtggcgctacgagagcttcgcgcatgccattacgtaaaaagatcagtttgtcgacgttatactgcaaatgcttatcgagcgcgttggcaacgttttccagatgattacgctggctggagatataggcatcttccagcaccaccacttcacgccaggtgagcaaggtggaaaaaagcaataccacgataaagcagagattaacgacatgaccaggccccaggcggcgtgcgagttttttcaaccagctctggttttccatttttgtctcgtgctgcaccctgacgactcccaacctgcttttttatgattctggcataacctggcgatagcgtaccgcaaaacagcgataattttataatggtggcatgataagacgcgactatcattcattgcaggcattagcacaccaggccggatgtgatccggcctgatgttaatgataccctttcacacttcttccgcagaacgactcccctcccccggaacaagctcggtttcatgaaaagcttcccgcttgaccccgtaaccgtcataccaacgacactcaaccataccgctggagtatccagtgacaatcatccgcgggccgccctctttaaccgtaacttcctcactaaccataaagctcatactcgcctccttttttcgagtgaaacttgttcaccttagttgaagatggcgaattttgcataatagccagtgcgagtattaatgtgcctgaccgcgcattttctctacggctttcactcccagcaccacgatgccgccgatgataaatccaagaatcagatttaaaacagtcggtaatatcatcgccactactgcactttgctgcccggcgaaatgttcaatggcgtgatgcagcggcgcaattccatgtaccacaatcccaccgccgacgaggaacatcgccagcgtgccgacaatgcttaacgctttcatcagccagggcgcgataatcaataaccctttacctaatgcctgcatcagcgcgctggatttttccgccagccaataccccaggtcatcaatcttaacgataacccctaccagaccgtagacgcccacggtcactaccagcgcgatgccactaagcaccagcacctgattaagcaacggcgcttcggccacaatccccagcgtgatggcgacgatttccgcagacaatataaaatcggtacgaatcgccccttttattttgtccttttcaaacttcagcggatcctgcgccgccagcttctccagacgctgctggctctgcgccggatcttctttatgtttacgcgcctccagcatatgcagcactttctctactccttcaaagcagagaaacgcgccaccaatcatcaacagaggcgtaatcgcccacgggataaacgcactgatgatcagcgccagcggcaccagaatcactttattaatcaggcttcctttcgccacgccccagaccacgggaagttcccggttggcccgcacgccactaacttgttgcgcattgaggcttaagtcatcccctaatacaccggcggttttcttcgccgccagtttgcccatcacggagatatcgtccagtagtgtggcgatatcatcgagcaacgtcagtaaactactcccggccaaaagcattccctctcatttttattgttgaagggtgtaagtatgaagcaaaaacggcagctctgatacttgcttcacaggtcaacatttttttaacaatcaagtgcaattatatctctcgccagcagaatgattttcacgtttactatgaaccacctttttatttccaccgtgagggattatgcgtttccgccagttgttaccgctttttggcgcgctgtttgcgttgtatatcatttggggcagtacctattttgtcattcggattggcgtggaaagctggcctccgttaatgatggcgggcgttcgattcctggcagccggtattttattgctggcatttttgctactgcgcggacacaaactccccccgctacgtccgctgctcaatgccgcgctgattggcctgttattgctggctgtcggtaatggcatggtgacggttgccgaacatcaaaatgttccttccggcatcgccgccgtagtggttgcaaccgtgcccctctttaccctgtgcttcagccgcctgtttggcattaaaacgcgcaaactggaatgggtgggtattgccattgggcttgccggaatcatcatgctcaatagcggtggaaatttaagcggcaatccgtggggcgcgattctgattttaatcggcagcattagctgggcgtttggcagtgtttatggcagccgcattaccttacctgtagggatgatggcgggtgcgattgagatgctggcggcaggcgtggtgttaatgatcgcgagcatgattgcgggtgaaaaactgacggcgctcccttcccttagtggcttccttgcggtcggctatctggcgctgtttggtagcattatcgccatcaacgcttatatgtatttaatccgtaatgtcagtccggctctcgccaccagctacgcttacgttaacccggtggtcgcggtcttgctgggtacgggactgggtggagaaacactgagcaagattgaatggctggcgctcggcgtaattgtcttcgcggtggtactggtcacgttgggaaaatatctcttcccggcaaaacccgtagttgcgccagttattcaggacgcaagtagcgagtaatcaagcgagtaaatgaatcccctgcgtgtcgatctgcgcgctggcaccttcgccgcagatccactcttccagacgctcggtaagcgcttcatccgtcagcttctcgcgcccacgtaacgcgcactcccagacaatcaatacgcgccagccgagttcctgcaagcgactgatatcgcggcgatcgcgctcaacatttttacctatcttctccagccagaactcggttcgagtcgcaggcactttaaacagatagcagtgatgatgatgccagaagcagccatgggtaaatatcacgcagcgatattcatcaacgacaaaatccggacgtccgggcagactggcgtcctgaacgcgaaatgccaggccctgcccggttaacagactggcgaggcgcttctctatcgccgtatcacgcgtggcaatcgcgcgcatatttttgctgcgagtggccttatcgtgaacgtcggccatgttgtgcctcttgctgacgcttagttatcgactacgtcggccatgttgtgcctcttgctgacgcaacgccaccgcctgtttgatttttggctcaagcagttttgccaccgcggcaaagaccggcacgaccacgctgttaccgaactggcgataggcctgagtgtcgctaaccggaatacggaatttcgcttctcccggcgcttcaaaacccattaagcgcgcgcattcccgaggcgttaaccgacgtggacgatgttgctgattcagcggatcgtcaaagtctttctcacccgtggccatatcccagccgcgatcgattaaaatttccgcgccatctttgtaataacgcgcagacagcgtacgcgtgacgctttgcggattgttcggataaaccattccataaccgaagccgttaccgcgcgcctgatgttttttcgcatatcgatagaggtacttccacagcaccggcgtcaggatatatttcgcctcgaccatcgggtccaacagctgcgccagcgtcactcgctgcgcagggaaacattcgctgatatcacgcagggtaaaatcggctttcagattcagatcgcgacgaaaacccaccagcacgatgcgttcacggtgctgcggcagaaaatgtttgccgtcgatgattttcggatcgtctggcccattatcttctgcatcagccacgtcatagcccagttcgtccagcgtctgcatgatgatgcggaacgttttaccctggtcgtgacttttcaggtttttgacgttttcgagcacaaacatcgccggacgacgcgcgtcgataatgcgtaccacatcaaaaaacagcgtgccctgggtatcgcaggcaaaaccgtgcgcccgcccgaggctgttctttttgcttacgccagccaggctaaatggctgacaagggaaaccggccagtaaaacatcgtgttcaggaatgtgttgacgaatatgttccgccgccgcctcatcactcacgccttctttatggctgagggtgatgtcgcggatatcttcattaaaatgatgcgtcgccggatcgcaataatggttggctttataagtgcgtaccgcatgtttgttccattcgctggtaaacacgcactgtccgccaatgctttcaaaaccgcgacggatgccgccaattccggcgaatagatcgataaagcgaaacgcataatgcggatgatgtgccggtggtttgggtaataacgtttgcagatgggcgaactctttctcacttaaacggtgccatgcgctgtcattcgccagcgcacgttttaaaattgccgcgctccagtgattctcacctacaccattaagctgcgccaccaacgttttaacatcataaatttgcagcagtttctccagcattgcctgtgcggcattcccggtgctgtaactatcggttacacttatattttcctgcatagatttcaccggccatctgagatggccgacaggttaacataattacagccatttagggccacgcgctcagccagcggaactaaacgcatctatcaccttgtgatcgacaccttcattctcccccgccagttcggcactgagcttcgccataaactcgactaaaaaatgcgcgttgtgctgcgccagctgcttgcctcttgcggtttgcatggtttgcggtagcttcagcaacttagtctggaaatgatccagcgcgtagcgtttatcatcaagcgggcgatgctgtgcgaacggatcttcaccatcaaacagcgccacgcccaatgccccactaacggcaaacacgcgcgccaggccaatcgcccccagggcttccagccgatccgcatcctggacaattttagcttccgttgttaagggggcgatttgcgcgctgaaactgtgagcggcaatggcatgacaaacggcctcgattttctccgccggaaattgctcgaactcttcacggagcaggcgacgcgtctcttctgccgccaggatactagaacgctgcctttgcggatgatttttcgccaggctcacaatatcgtgaaaataacaggcggttaaaatcaccagcatatcgacatcgtcatctgccgccagcttctgtgccgtagcccagacgcggcgaaaatgacacacgtcatgggccgcgtcctggtgctgatgatggtttttcaaccagttttcgaactgtgcctgccagtgttgtaagtccatacgcgctccgttgccaaagagtcgccaccttagcagtttttattcatagcgtctgctacgtgcgggacgaggtcgggtgtaccaggcaatgctgcctaacaatgccccgaccagagccataaataaaaatccgaccagtgcccctaaccactttcccgcggtagagcctaaatcgctttcaaatccgctcacgggggcatcgggaatccggctcatcacccagatgtaacgcgccattgcccagacgaaatagccacaccatgtatagaaagcccacaaagccagtttgccgccagggctgcgagagagtctctcttccatctttgtgctaccgtattccattttgagataacccggaaaattcagacttagtactattatgtgataaaagtcacatttttccacattggatgagccagtcaagactcaatcattttttgaacaaatagataaattttgcgcaacggcagtgaatacaggaaaaatcgttttgagcgattttatttatctttgatatcggctttattaattcatttaatcaatatattagcactgattacaattatacctttttattattctgtgtcatgatgcttccgttattagccttttatcgtcttgtttatattttttgggccggcatgatgccggctttttttatgccttcattaatgtgcgcctgatcacaccagccgtttggcgcaacaatcattgataccccctatgtttccgctcaactcataacatattgatatacatttataattttcatgaatatttatatttagaattcataattatgaattatattaaatagattagaaacattttgatatcttttaaatacatttgttacatgtaatccttaaaataaaatgaacttcatagaatagtatccaaatgtgctttttttggataacggcacttattgatatattcatgaagattataatcacaagggaatacataatgaaaagaaaagttctggcaatgctggtcccggcgttattagttgctggcgcagcaaatgcggctgaagtctataataaagatggtaataaactggatttgtacggaaaagtagtgggtctgcactacttctctgatgattctggcagcgatggcgacatgtcatatgcccgtatcggtttcaaaggtgaaactcagatcgctgatcaattcactggttatggtcagtgggaatttaacattggcgcaaacggtcctgaaagcgacaagggtaataccgcaacgcgtctggcatttgcaggtttaggctttggtcagaatggtactttcgactatggtcgtaactacggtgtcgtatatgacgtagaagcatggaccgatatgctgccagaatttggtggcgatacctatgctggcgctgacaacttcatgaacggtcgtgctaatggtgttgcaacctaccgtaacaatggcttctttggttaggtcgatggcttgaactttgctttgcaatatcagggtaataatgaaagtggtggaccattcgggcaggaaggttccggtagtggtgatggccgtagcctttccaaagaaaatggtgatggtttcggtatgtcaacatcctacgacttcgacttcggtttaagtctgggtgctgcatatcaaactctgatcgttcagatcgtcaggttggagttggtttaaatgatcgtaaccatagcaacagaaatgctggtggtgaaaccgctgaagcatggactgttggtgcaaaatatgatgctaataatgtgtatttagcagctatgtacgctgaaactcgcaatatgaccccatatggtggtggcgagtttgataatggtgaatcaagatcagccatcgctaacaaaacccaaaactttgaagttgttgctcagtatcagttcgactttggcctgcgcccgtccatcgcttacctgcaatctaaaggtaaggatttaggcggttgggctcatgacggcaacggcgacccacgttacaccaataaagatctggttaaatacgttgatattggtgcgacctactacttcaacaaaaacatgtccacctatgttgattacaaaatcaacctgctggacaacgacgatgacttctacgaagcaaacggcatcgctaccgatgatatcgttgctgtgggcttagtctaccagttctaatcagtcaactcgctgcggcgtgttactgtaaaactgaacactagcctgagttcgtccctcatcgaactcaggcttttttattggcatttcatctccatctgcggcacacgcaattgccgaagcatatcgatacagcaccttaccctgcccctcctggcacaataacatcaaccagctactcttcaagctaacacccaaatgcatttctttatgaattaatccgtaacaaacacgcttcccatatagaaatatttgcaaaaatagtgcatgaaataagctttttctctaccaatccgggatataaatattcatcagcaccacaatattccacagcactaaatctctccccgccaccccgtacctctgataatggtctaaaatcattgaagccacttgcgacgacgttgctcaataaggaaaatttggcgtgaataatattcaacaccagtgcagcatcatcattacatacttacagccgccgactaccgctttcgatatattgactcaattttccagcctggttaaaaatagcgaccagctcagtcgcaaatatagtgactaccctaactaagcaacaataaggaatacactatgactgttcaaacaagtaaaaatccgcaggtcgatattgctgaagataatgcattcttccctagtgaatatagccttagccaatataccagtcctgtctctgatcttgatggcgtggactatccaaaaccttatcgcggtaaacataaaattctggtgatcgccgcggacgaacgttatttgccgaccgataacggaaaactgttcagcaccggtaaccatccgattgaaacgttgctgccgttgtatcatctccatgctgcaggtttcgaattcgaagtggcgaccatttccggtctgatgaccaagtttgaatactgggctatgccgcacaaagatgaaaaagtaatgccattctttgagcagcataaaagcttgttccgcaatccgaagaaactcgcggatgttgttgccagcctcaacgctgatagcgaatatgcagcaatctttgttcctggtggtcatggcgcacttattggtttacctgaaagccaggacgtggctgccgctttacagtgggcaatcaaaaatgaccgttttgttatctccctttgccacggcccggcggcttttctggcgcttcgccacggcgataacccactgaatggttattccatttgcgcattcccagacgccgcagacaaacaaacgccagagattggctatatgccgggtcatctcacctggtacttcggcgaagaactgaagaaaatgggcatgaatatcattaatgacgacatcaccgggcgagtacataaggaccgtaaacttctcaccggcgacagtccttttgcagcgaatgcgttgggtaaactggcggcgcaggaaatgctggcagcttacgcgggttaatccctgttacgtttgaatgtaagcgcataatcaatcgcggccgcgttagtactcacgacgtggctgcgttttttcacggttaatttatggcgtactgaagccctatgttaatttctttgcggtaacgtaatccggaacacattatgcttattgagatagtgatacgtagcacttcccccatgcaattcggcaatcgctttgactaaagaaaggcctagtccctgacctacggaatgacggctattatctccccgccaaaatctacggaagagtttttcaggctcattaattttcgttccagggctggcgatatcaatattaagatagctgttggtatcaagaaaactggttatatgaatacggcttttttctgggctatatctaatggcattaacaataagattgcttaacattcgttgtagtaaaattttatccgcaaagatttgctgattgcactcgaccttaaagcaaatctctttctcgtcactaaggtattcaagatagtccaacaaattttcgacttccttattgagagaaaggctgtccagtttcaccaaaacattgtttttatctgccctggcaagaaacagtatgttctctgttaaccggctaatattttccagctcttcaatgtttccggcaattgttttttgatattcagcgatacttctggtttgactgagcgtaacctgattctgacccagtaatgcattaattggcgttctaagttcatgagcgagatcgtcagcaaactgacttagacgctcaaaatctttgactaaagcatgatgcattttattcaacgcctgcccaagaggttttagttctctcggtaatgcgctaacctcaacaggctctcggctatcgttataattcagcgcttccgttacaccactcaactttttgatctctcgtaatcccgttctgattaacagcggacttaatacactgcaaagtacaatggcgacaatgcaaattataatgctattaattttatactgttcaagcatgttatgtctggcactagccaatttagccacagtaaccgttaaacttgggctaacttcatcaatattaattcgtaaagcatctatctctgtatcattaataatgcttctgtaaatgccagctgcgctgattgtctcactagcaggtatgttatttaacatgccatcactgacatttgtccggttaacaattttattgatgctatcaccatgaataatcaagatatcctgactaacatccatcatccggttaaagtacacaggtaacgtatctggatttaccccatcaattaacaactgcttgatctgcgctgtccggttaatgagtgttgtatcatcgcgccatttcaactcacttgccaggccattatagagagtccagacaattccggcgccagcaacagacagtagcaatataaaaagcaaggttaaacggacggttatagatagtcttttcattatttttttaccgctacgaaactatagcccatcccccggattgtggcaattagcttttcaggaaaaggatcatcaacttttgcgcggagcctgcgaatggcgacgtccaccgtattggtatcactatcaaagttgattccccaaatttcactcgcaataaccgttctgggtataatttcgccagctctggaggccagtagccaaagtaactgaaactccttgcgcgtcagtgtaatactgatattgtccctgctcacactatgactaacagagtccattcttaagccgctgatttctaatgtactattcaaagcgtgatgttgccttaattgtgcccgaacccttgccagcaactcagaaaaactaaaaggttttaccagataatcatttgccccactgtccagccctctgactctgtcatcgacagaatcccttgcagtaaggcaaataacaggggtttgctttgctgttcttaacgtttgtaagatctgccagccatccatacccggaagcataatatccagaatgatcaatgcataatcatccttcagcgcaagataaagcccatctctgccatcagaaacggcatcgatgacataacccgcttcggaaagcccctgcgttacccattcctgggtcctttgattatcttcaataagtagaatcttcatgaaaataatatgccataaatcatatgttatagaaacagcctggttcattacaaaattgtaatgctgctgtaaggttaccctggacgctttttcgctatcctcaaaactcattcacatgacaaggatataaacatgttaaagcgttatttagtactcagcgtagcaacggcagcatttagtttaccttctttggttaatgccgcacaacaaaacattcttagcgtgcacattttgaaccagcaaacaggaaaacccgctgctgacgtgacagtcactcttgaaaagaaggcggataacggctggttacaacttaataccgccaaaacagataaggatggacgaattaaggcactgtggcccgagcaaactgcaactacgggcgattaccgtgtcgtatttaaaaccggggactatttcaagaaacaaaatcttgaaagtttcttccctgagatccccgttgaatttcatattaataaagtgaacgagcattatcatgtgcctttattacttagccaatatgggtatagtacctatcgtggcagttaatgcataaatatgtaaaagcagatctctgctactgttagggaggacactccctgacagattaacagtaaacggctcttgctggctaacgacaaaaaagtgtgatggcttatgaaaaagaatcaatttttaaaagaaagtgatgttacggccgagagcgtattctttatgaagcgtcggcaggtgttaaaagcactgggcatcagtgcaactgcactttctttgcctcacgctgcgcatgccgatctgcttagctggtttaaagggaacgatcgcccgcccgcccccgccggaaaagcgctggagttcagcaagcctgccgcctggcaaaataacctgccactgacgccagcagataaagtttccggttataataacttctatgaattcgggctggataaagccgatcccgccgctaatgctggtagcctgaaaaccgatccatggacactgaaaatcagcggcgaagtggcaaaaccattgaccctcgatcatgatgacttaacccgtcgcttcccgctggaagagcgtatttatcgtatgcgctgcgtggaagcgtggagcatggtggtgccgtggattggttttccgctgcacaaattgctggcgcttgccgaacctaccagcaatgcgaagtatgtcgctttcgaaacaatttatgcaccggaacagatgccaggccagcaggaccgctttatcggcggtgggctgaaatatccttatgtcgaaggattgcgtctcgacgaagcaatgcatccgctcacactgatgaccgtaggtgtttatggcaaggcgttaccgccacaaaatggcgcgccggtgcgactgattgtgccgtggaaatatggctttaaagggattaaaagcatagtcagtattaagctgacccgcgagcgtccgccaaccacctggaatctggcagcgcctgacgaatacggtttttacgccaacgttaatccgtatgttgatcacccgcgctggagtcaggctaccgaacgatttattggtagtggcggcatcctcgatgtacagcgccagccaacgctactgtttaatggttacgccgcccaggtggcaagcctgtatcgtggcctggatttgcgggagaatttctaaatgcgtctgacagcaaaacaggtgacatggctgaaagtttgcctgcatcttgccggattgttgccgtttctctggctggtctgggcgatcaatcacggtggactgggtgccgatccggtgaaagatattcagcattttactggtcgcactgcactgaaatttttgctggcgaccttgttaatcacccctctggcacgctacgcaaaacagccgttattgatacgcactcgccgcctgttaggattatggtgctttgcctgggcgacactgcatttaacaagttacgcattgctggagctgggcgtgaataatctggcgttattaggtaaggagttaattacccggccttatttaacgttaggtattatcagctgggtaattttgcttgctttagcgttcactagtacccaggcgatgcagcgaaaactcggcaagcactggcaacagttgcataatttcgtctatcttgtcgcgattctggccccaatacattatctgtggtccgtgaagattattagtccgcagccgctcatctacgctgggctggctgtactgcttttagccttacggtataagaagttgcgttccctttttaaccggttacgcaagcaggttcacaacaaattatctgtataacttcatattgccgacaaagtacgcgttatccctgccggatgtggcgcgagcgccctatccggcatacacagatcgcatcaggttatgtttcgtttgtcatcaacctcaaatcaccaaaataatttattttatttcaataagatagataagtagaactgagaaagccatgctctcgtttcctaagagttgttgcattttgctatatgttacaatataacattacacatcatatacattaactctggaggaaactgttttggcgattcgtctttacaaactggctgttgctttaggtgtctttattgttagcgctcctgcctttagccatggtcatcacagtcacggcaaacccttaacagaggtcgaacaaaaagctgctaatggtgtttttgatgatgccaatgtacaaaaccgaacgctcagtgactgggatggagtctggcaatccgtttatcctttactgcaaagtggcaaacttgaccccgtctttcagaagaaagcggatgcagataaaactaaaacatttgctgaaattaaagattattatcacaaaggttatgcaacagatatcgagatgattggcattgaggacggcattgttgaattccatagaaataatgaaacaacaagctgtaaatatgattacgatggatacaaaatactcacctataaaagtggcaagaaaggcgttcgttacttattcgaatgtaaagatcctgaaagcaaagcccctaaatatatacaatttagcgatcatataattgcaccacgaaaaagttctcattttcacatttttatgggtaatgatagtcagcaatctttattaaatgaaatggaaaactggccaacgtattatccatatcagttgagtagcgaagaagtggtcgaggaaatgatgtctcattgagtattctcatgataacgcctcgatgccgctttagtaagttatcataactgccactggtccatccacaaacgccactgaacgcaagctagctacagacacgctcatcactatgacgtgtctgtatattaataagctaacccgcattgagttaaccaataacggattccatacacaatacggccaacagagaaagatacctgtgctcacgccattgcttatattggctggttacaatatgcactatcaattttttaaataacaaattattaaaaccacatctgtataaggaatttttaaggttcgtgggatagcttgactgtgaaaatcacaggagctacaaaaatgaaccgattcagtaaaactcaaatttatttacattggataacgctgcttttcgttgcaataacctatgccgcgatggaactccgtggctggtttcctaaaggtagtagtacttatctgctgatgcgagaaacacattacaatgcgggtatattcgtttgggtgttaatgtttagtcgcctgattataaaacaccgttatagtgatccttctattgtgccaccgccacctgcctggcaaatgaaagcggctagcctaatgcacatcatgctttatataaccttccttgcacttcctctgctggggattgctttgatggcttacagtggaaaaagctggagtttccttggtttcaatgtgtctccctttgttaccccaaacagcgaaattaaagcactgataaaaaatattcacgaaacctgggcaaatataggctactttttaatcgcagctcacgctggcgcagcactctttcatcactacattcagaaagataatactctgttacgaatgatgcctcgccgcaaataagtcgatccccttacaaggaaatgtgaaccatggacatcaacgcgtcataaatgtttacgcaagtgcacaatgcaccctttccactatcaacaaggaggagcagaaactgtgtaaatcgtacaatggtaagacttatcaaaaatacaggttaattttggtatttaaaccttttttacttgttagtatgatacaaaggctttcaaaaaagctgcgaaattcaacaactcttggaaattatggactttgtcccgcggctttaatctgacggccgcgttccttttttgactcaattattgaacccttctctacgcaacttcagttcccaccaccaactttgcggcagtttcataggatgaatgtctaaaagaataatggtgagcgataagaaaacgactgaataactgcacattttcgctcgaaagcttcctgtcagatccatagcgaatcaagtgctgaatgtcacagtatcgaacagaaaacagtgacgatctaacccttcaagaatattctacgattgttctgtttaggaaaagaaaggcgggaagtcgggagataagtcattgataaaggttcagatggttgccatgatgccaggaaatttggcattttaacagtccctgtccgtgcaattttgttcaagtgacgagtttgcgagcaaaacgatgattaagtggccctggaaagtacaagaaagtgcacatcaaactgcccttccctggcaggaagcactaagcatcccccttttaacgtgtctgacggaacaggaacaaagcaaattagtcactcttgccgaacgttttttacagcaaaagcggcttgttcctttacagggctttgaactggatagtttaagaagctgccggatagcacttctattttgcctacccgttctggagttaggactggaatggctggatggttttcatgaagtcttaatttatcctgcgccatttgtggtcgatgatgaatgggaagacgatatcggtctggtgcataaccaacgtattgttcagagtggtcagagctggcagcaagggcctatcgttttgaactggttggatatacaagattcttttgatgcttctggttttaacctgattattcatgaagtcgctcataagctggacacccgtaacggcgatcgcgccagcggagttccctttattccgttgcgtgaggttgctggctgggaacacgatcttcatgctgcaatgaacaacattcaggaagaaatcgaattggttggcgagaatgcggcgagcattgatgcttatgcagccagcgatcctgctgaatgttttgccgtactttctgaatatttctttagcgccccagaactttttgctcctcgtttccctagtttgtggcaacgtttctgccaattttatcaacaagatcctttgcagagactgcatcacgctaatgatacagacagctttagcgcgacgaatgttcattaattaacaactttgcagattaattaaccaattgaaatgacttatgaaatttagtgttgacagacaaggtaccgctaagtaatattcgccccgttcacacgattcctctgtagttcagtcggtagaacggcggactgttaatccgtatgtcactggttcgagtccagtcagaggagccaaattctaaaaattcgcttttttagcgcaatgtcactgaccttagttgaacattgttttttaacggatagcgggtttttaacatcttaagcgccctcgacctttatggttgagggcgttttgctatgaacgccatcaccattttcccctcgattataaaacttgagttattcagtagtctcccctcttgcaactcacacccaaaactgcctaacgaaaagttattaattttcaatcatattgctatcagtatttacattttttcgctgtgctagaaagggcgcatttatgttagctcgtagtgggaaggtaagcatggctacgaagaagagaagtggagaagaaataaatgaccgacaaatattatgcgggatgggaattaaactacgccgcttaactgcgggtatctgtctgataactcaacttgcgttccctatggctgcggcagcacaaggtgtggtaaacgccgcaacccaacaaccagttcctgcacaaattgccattgcaaatgccaatacggtgccctacacccttggagcgttggaaagcgcccaaagcgttgccgaacgtttcggtattagcgtggctgagttacgcaaactcaaccagtttcgtacgtttgctcgaggttttgataatgtccgccagggtgatgaactggatgtcccggcacaagttagtgaaaaaaaattaaccccgccgccgggtaatagcagtgacaacctcgagcaacagatagccagtactagtcagcaaatcgggtctctgctcgccgaagatatgaacagcgagcaagcggcaaatatggcgcgtggatgggcctcttctcaggctagtggcgcaatgacagactggttaagccgcttcggtaccgcaagaatcacgctgggcgtggatgaagattttagcctgaagaactcccagttcgattttctccatccgtggtatgaaacgcctgataatctctttttcagtcagcatactctccatcgtactgacgagcgtacgcagattaacaacggcttaggttggcgtcatttcactcccacatggatgagcggcatcaacttctttttcgaccacgatcttagccgttaccactcccgcgccggcattggcgcggagtactggcgcgactatctaaaattaagcagtaacggctatttgcgactgaccaactggcgcagcgcacctgaactggacaacgattatgaagcacgcccggccaatggctgggatgtacgcgcagaaagctggctacccgcctggccgcaccttggcggtaaactggtctatgaacagtattatggcgatgaagtggccctgttcgataaagacgatcggcaaagtaatcctcatgccataaccgctggacttaactatacccccttcccgctgatgaccttcagcgcggagcaacgccagggtaaacagggcgaaaatgacacccgttttgccgtcgattttacctggcaacctggcagcgcaatgcagaaacagcttgacccgaatgaagtcgctgcacggcgtagccttgcaggcagccgttatgatctggtggatcgcaacaacaatatcgttctggaatatcgcaaaaaagaactggttcgcctgaccctgacagaccccgtgacagggaagagtggagaagtgaaaagtctggttagcagcctacaaaccaaatatgccctgaaaggctataacgtcgaagccaccgcactggaagctgccggtggcaaagtggtcacaacgggtaaagatattctggttaccctgccggcttaccggttcaccagtacgccagaaaccgataacacctggccgattgaagtcaccgccgaagatgtcaaaggcaatttgagcaatcgtgaacagagcatggtggtcgttcaggcacctacgctaagccagaaagattccagcgtaagcttaagtacccaaacattgaacgcggattcccatagtaccgccacactgacttttattgcgcatgatgcagcaggtaatcctgttgtcgggctggtgctcagcacgcgtcacgaaggtgttcaggacatcaccctttctgactggaaagataatggtgacggaagctatacccagatcctgaccacaggagcgatgtctggcacgctgacgctgatgccacagctgaatggtgtggatgcggctaaagcccccgccgtggtgaatatcatttctgttagcagttcccgaactcacagcagtattaagattgataaggaccgttatctctccggcaatcctatcgaggtgacggtagaactgagagatgaaaatgacaaacctgttaaggaacaaaaacagcaactgaataacgcagtcagcatcgacaacgtgaaaccaggagtcactacagactggaaagaaaccgcagatggcgtctataaggcgacctataccgcctataccaaaggcagtggacttactgcgaagctattaatgcaaaactggaatgaagatttgcataccgctggatttatcatcgacgccaacccgcagagtgcgaaaattgcgacattatctgccagcaataatggtgtgctcgccaatgagaatgcagcaaacaccgtcagcgtcaatgtcgctgatgaaggaagcaacccaatcaatgatcataccgtcacgtttgcggtattaagcggaagcgcaacttccttcaacaatcaaaacaccgcaaaaacggatgttaatggtctggcgacttttgatctgaaaagtagtaagcaggaagacaacacggttgaagtcacccttgaaaatggcgtgaaacaaacgttaatcgtcagttttgtcggcgacagcagtactgcgcaggttgatctgcagaagagcaaaaatgaagtggttgctgacggcaatgacagcgtcacaatgaccgcgaccgtccgggatgcaaaaggcaacctgctcaatgacgtcatggtcactttcaatgttaatagtgcagaggcgaaactgagccaaaccgaagtgaatagccacgacgggatcgccacagctacgctgaccagtttgaaaaatggtgattatagggttacggcctctgtgagctctggttcccaggctaatcaacaggtgaattttatcggtgatcaaagtactgctgccctgaccctcagtgtgcctagtggtgatatcaccgtcaccaacacagctccgcaatatatgactgcaaccttgcaggataaaaatggcaacccactaaaagataaagaaatcaccttctctgtgccaaacgacgtcgcaagtaagttcagcattagcaacggaggaaaaggcatgacggatagtaacggggttgcaatcgcctccctgaccggcacgttagcgggcacgcatatgatcatggctcgtctggctaacagcaatgtcagcgatgcacagccaatgacgtttgtggcggataaagacagagcggttgtcgttttgcaaacaagcaaagcggaaatcattgggaatggcgtggatgagacaactctgacagcaacagtgaaagatccgagcaatcatccggtggcggggataacggtaaacttcaccatgccacaggacgttgcggcaaactttacccttgaaaataacggtattgccatcactcaggccaatggggaagcgcatgtcacgctgaaaggtaaaaaagcgggcacgcatacggttaccgcaacgctgggtaataacaataccagtgatagccagccggtaacatttgtggcggacaaagccagcgctcaggttgtcctgcagataagtaaagatgagatcacaggtaatggcgtcgatagcgcaacgctaactgcaacggttaaagatcagttcgacaatgaggtgaataatcttccggtaacattcagcagtgcctctagtggactcaccctgaccccgggagtaagtaataccaacgagtctggcatcgcgcaggccactctcgcaggcgttgcctttggtgagaagacggttactgcaagtctggctaataatggtgccagcgacaacaaaactgtgcattttattggcgacacagcggcggcaaaaattatcgagttggcgcctgtcccagacagcataatcgccggtaccccgcagaacagctccggcagcgtcatcaccgccacagtcgttgataataatggctttccggtgaaaggtgtgactgtgaacttcaccagcaacgcagcgacagccgaaatgacgaacggcggtcaagccgtgacgaacgaacagggtaaggctaccgtcacttataccaatacccgctccagcatagaaagtggagcgagaccggataccgttgaggccagtctggaaaatggtagctccacgcttagcacaagtattaatgtcaacgctgatgcgtctacggcacatctcaccttgctacaggcactttttgatacagtctccgcaggcgagacaaccagtctgtatattgaggtgaaggataattacggcaacggtgtcccccagcaggaggtaaccctcagcgttagtccaagtgaaggcgtgacccccagtaataacgctatatatactaccaaccacgacggcaatttttacgcaagctttaccgctacaaaagccggggtttatcaattgacggcaaccctcgaaaatggcgatagcatgcaacaaacagtgacctatgtgccgaacgtcgcgaatgctgaaatcacgctggcagccagcaaggatccggtgattgccgacaataacgatctcacgacactaacagcaacagtcgctgatacagagggcaatgcgatagccaacactgaggtaacatttactctgccggaagatgtgaaggcgaacttcacgctgagcgatggcggtaaagtgattactgatgctgaaggcaaagcgaaagtcacgctgaaaggtacaaaagcaggcgctcatactgttacagcaagcatgactggcggtaagagtgagcagttggtggtgaactttattgcggatacgctcactgcgcaggttaatcttaacgttaccgaggacaattttatcgctaataacgtcgggatgaccaggctgcaggcaacagtgactgatggaaacggcaacccgttagccaatgaggcggtgacattcacgctaccggcagatgtgagcgcaagctttactctcggacaaggcggttccgccattactgatatcaacggcaaggctgaagttacactgagcggtacaaaatccggcacctaccccgtgacagttagcgtgaacaattatggtgtcagtgatacgaaacaggtgactttgattgccgatgctggtaccgcaaaactagcctccttaacctctgtatacagtttcgtcgtcagcacgaccgagggcgcaaccatgacggcaagcgtcactgacgctaacggcaacccggtagaaggcataaaagttaatttccgcggaacctccgtcacgctaagcagcaccagcgttgaaacggatgatcggggtttcgctgaaattcttgtgacaagcaccgaggtcggactgaaaacagttagtgcctctctggcagataaacctactgaagtcatcagccgattactgaatgccagtgcagatgttaattctgcgacgattaccagtctggagataccggaaggtcaggtaatggtcgcacaagacgtagcagttaaagctcacgttaacgaccagtttggcaacccggttgcgcatcaacccgtgacattcagtgcagagccatccagccaaatgatcatcagccagaatacggtctctactaatacgcagggtgtagccgaggtcaccatgacgcccgaaagaaacggtagctatatggtgaaagcatccctgccgaatggagccagtcttgagaaacaactggaggctattgatgaaaaactgacactcacggcgtccagtccgcttatcggtgtctatgcccctacaggcgctactctgacggcaacgctaacctctgcaaatggcactccagtggagggtcaggtcatcaactttagcgtaacgccagaaggggcgacgttaagtggcggaaaagtgagaactaactctagtggtcaggctccagtcgttttgaccagcaataaagtcggtacatatacggtgactgcatctttccataacggcgtaacaatacagacacagacaaccgtgaaagtcactggcaacagtagcaccgcccatgttgctagctttatcgctgatccaagcactatcgccgccaccaacactgatttaagtaccttaaaggcaacggttgaggatggcagtggtaacctgatcgaaggtctcactgtgtacttcgccttaaaaagcggctctgccacattaacgagtttaacagcggtgaccgatcaaaacggaatcgcgacaacaagcgtgaaaggagcgatgacaggtagcgtcacggtaagcgcagtcacgaccgctggtggaatgcaaacagtagatataacgctggtggctggcccggcagacaccagccagtccgtccttaagagcaatcggagtagtctgaaaggggactataccgatagtgctgaattacgtcttgttctgcacgatataagtggcaatccgatcaaagtttctgaagggatggaatttgtgcaaagtggtactaacgtgccctatataaaaattagcgcaattgattacagtctaaatatcaacggtgattacaaagccactgttacaggaggcggagagggtatcgcaacgctgatccctgtattgaatggtgttcatcaagctggtctgagtaccacaatacaattcactcgcgcagaagacaaaataatgagcggtacagtaagtgtcaatggtactgacctaccgacaactacattccctagccaggggttcaccggggcgtattatcagttgaataatgacaactttgccccaggaaaaacggcggctgattatgagtttagtagctctgcctcctgggtcgatgttgatgctaccggtaaagtgacatttaaaaatgtcggcagcaatagcgaaaggattacggcgacgccaaaaagtggaggccctagctatgtatacgaaatccgtgtgaagagttggtgggtgaacgccggcgaggctttcatgatatacagccttgctgaaaatttttgcagcagcaatggctacacgctccccagagcaaactatttaaaccactgtagttcccgaggcatcgggagtctgtacagtgaatggggagatatggggcattacacgactgacgctggttttcaaagtaatatgtattggagttctagtcccgcaaacagtagcgaacaatacgtagtttccctggcaacaggtgatcaaagcgtatttgaaaagcttgggtttgcttatgcgacatgttataaaaacctgtgattttccgttataatttcttaaagagtgttccattcggggcactcttttttacattccctctacagaactagcccttctctcacagaaaatgaataaataaaaatgcggcaccgccagaatcgcgttcgatgtgactatgatcattttcggtgagtactgctttgatctaaaggctggttttctgtgatgattgaccagcctcagagtattgatgacaccaccgttcataacagatcggcattactatgcataagtactgtctcatattctcgccaaaacactttttaatgcctttgcgaattcatccagacttatattgtcaattttttgcccaacgacgactgactccgagacatcggccattgcgggccatcgcgttttgtaatcagcataaattgcaacaacaggggtattataggcacttgccatatgtaatattgaggtgtcaggagttattgcgatataagcatcttttatgattgctgctgaacgtttaatcgagggtggtaaggataaacggtagacattattataacaatccactaatgccctggctttatcttcacctttgggtccatgaacgatcactattggtatatctgtttcactttaaatttttgctattagattttctgcaatcgataatgaaaatgtacgttcctgcgagctaccttctaaattgaacgcaatgtaagatcctaacgatcgcatttcctcgcgcacctcatcgagtacatcctcacttagtggcaattcatatattggcctgactgctggaaaacccgcctcacgcatcataaatgcccatgtcataggtacgggagcccggagtttctgatccatactggacgcgttcttgcacaaaggggagaagcaattcatggttataccaacaacctgaaaattcgtttttgctttcaactgactgataaataacatcgttttcaggttctttttacgcatcccctcaatgcaaagatccggcgtaccgtattgctgtgttatgttctttgctaaatcttttatttcttttaatgttgcgtgatcctgcatagtcattgtgactaatgttaatttagtctgttcaagtttaagcgcattaaagacttctaaattaattgtcgacgttacaattaaaagatgcttaattttatgcaattcaagcgcccgaataacaggaaagatggccatagcatcgccaatctgatcgggaatatggatgacaacaaagtctgttttttcaatattgaaattataagctttataatcgtagtaactaaatgcaatacgtctcaacaatgatgctaaaaacatacctaacctcgcctccctactggttataatgcaatgcagtctatcagactcatcagggtgccattttgtgcatatgcggacttttatgtttcatatctctaacctgtgggtcctctgcttaatccttaaacaacaccagcaactcctgcgctttcatcttccatcgaatttttcatgttgccgctaatcagccataaaatcatttgcagatgcgctctgtcgaggtagtctcataaggttcgtttatagatcgacggcaatgtgagttaccttttccatactaattataaaaagacagtacaaacaggatcattatggactccacgctcatctccactcgtcccgatgaagggacgcttagcttaagtcgcgcccgacgagctgcgttaggcagcttcgctggtgccgtcgtcgactggtatgattttttactctatggcatcaccgccgcactggtgtttaatcgcgagtttttcccgcaagtaagcccggcgatgggaacgctcgccgcatttgctacctttggcgtcggatttcttttccgtccgctcggcggtgtcattttcggtcactttggcgaccgactgggacgtaagcgcatgttaatgctgaccgtctggatgatgggcatcgcgacagccttgattggtattcttcctagtttcagcaccattgggtggtgggcacctattttgctggtgacactgcgtgccattcagggatttgcagtcggcggcgaatggggaggcgcggcgttgctttccgttgaaagtgcaccgaaaaataaaaaagccttttacagtagcggtgtacaagttggctacggtgtaggtttactgcttagtaccggactggttagtttgatcagtatgatgacgactgacgaacagtttttaagctggggctggcgcattcctttcctgtttagcatcgtactggtactgggagcattgtgggtgcgcaatggcatggaggagtccgcggaatttgaacaacagcaacattatcaagctgccgcgaaaaaacgcatcccggttatcgaagcgctgttacgacatcccggtgctttcctgaagattattgcgctacgactgtgcgaattgctgacgatgtacatcgttactgcctttgcacttaattatagtacccagaatatggggctaccgcgcgaacttttccttaatattggtttgctggtaggtggattaagctgcctgacaattccctgttttgcctggcttgccgatcgttttggtcgccgtagggtttatatcacaggtacgttaatcggaacgttgagcgcatttcctttctttatggcgcttgaagcacaatctattttctggatagttttcttctccataatgctggcaaacattgcgcatgacatggtggtgtgtgtgcaacaaccgatgtttaccgaaatgtttggtgccagttatcgctatagtggcgctggagtcggttatcaggttgccagtgtggttggcggtggatttacaccttttattgccgctgcactcatcacttactttgccgggaactggcatagcgtcgccatttatttgctggctggatgcctgatttccgcaatgaccgctttgttgatgaaagacagtcaacgcgcttgatagcctggcgaagatcatccgatcttcgccttacacttttgtttcacatttctgtgacatactatcggatgtgcggtaattgtatggaacaggagacacacatgaataataagggctccggtctgaccccagctcaggcactggataaactcgacgcgctgtatgagcaatctgtagtcgcattacgcaacgccattggcaactatattacaagtggcgaattacctgatgaaaacgcccgcaaacaaggtctttttgtctatccaagtctgaccgtaacctgggacggtagcacaaccaatccccccaaaacgcgcgcatttggtcgctttacccacgcaggcagctacaccaccacgattactcgccctactctctttcgtagctatcttaatgaacaacttacgttgctgtatcaggattatggtgcgcatatcagtgtgcaacccagccagcatgaaatcccttatccttatgtcatcgatggctctgaattgacacttgatcgcagtatgagcgctgggttaactcgctacttcccgacaacagaactggcgcaaattggcgatgaaactgcagacggcatttatcatccaactgaattctccccgctaagccattttgatgcgcgccgcgtcgatttttccctcgcacggttgcgccattataccggtacgccagttgaacattttcagccgttcgtcttgtttaccaactacacacgttatgtggatgaattcgttcgttggggatgcagccagatcctcgatcctgatagtccctacattgccctttcttgtgctggcgggaactggatcaccgccgaaaccgaagcgccagaagaagccatttccgaccttgcatggaaaaaacatcagatgccagcatggcatttaattaccgccgatggtcagggtattactctggtgaatattggcgtgggaccgagtaatgctaaaaccatctgcgatcatctggcagtgctacgcccggatgtctggttgatgattggtcactgtggcggattacgtgaaagtcaggccattggcgattatgtacttgcacacgcttatttacgcgatgaccacgttcttgatgcggttctgccgcccgatattcctattccgagcattgctgaagtgcaacgtgcgctttatgacgccaccaagctggtgagcggcaggcccggtgaggaagtcaaacagcggctacgtactggtactgtggtaaccacagatgacaggaactgggaattacgttacagtgcttctgcacttcgttttaacttaagccgggccgtagcaattgatatggaaagtgcaaccattgccgcgcaaggatatcgtttccgcgtgccatacgggacactactgtgtgttagtgataaaccgttgcatggcgagattaaacttcccggccaggctaaccgtttttatgaaggcgctatttccgaacatctgcaaattggcattcgggcgatcgatttgctgcgcgcagaaggcgaccgactgcatagccgtaaattacgaacctttaatgagccgccgttccgataataagttctgaaccttcttatcagaaatagatgtgaaggagtaagtaagacacctggcaaatagcctgcaataatcgtgggctgtttgcttccttgggcggatacgagttttattatcgtcttaatgatttccacatattaaaagcaagtatgctttcaaaacacaattataaaaaatcccgccaacaatataagtttttataaaattaaatataagattatggctttagaatatttttatttctaatagacgagatttttcctgttatgatataatatgctgaattaacacatgttaacgatttaccagtaatgtaaataaattttcgaggagatcattccagtgggacgtaaatgggccaatattgttgctaaaaaaacggctaaagacggtgcaacgtctaaaatttatgcaaaattcggtgtagaaatctatgctgctgctaaacaaggtgaacccgatccagaattaaacacatctttaaaattcgttattgaacgtgcaaagcaggcacaagttccaaagcacgttattgataaagcaattgataaagccaaaggcggcggagatgaaacgttcgtgcagggacgttatgaaggctttggtcctaatggcagtatgattatcgccgagacattgactagtaatgttaaccgtacgattgctaacgttcgcacaattttcaataaaaaaggcggcaatatcggagcggcaggttctgtcagctatatgtttgacaatacgggtgtgattgtatttaaagggacagaccctgaccatatttttgaaattttacttgaagctgaagttgatgttcgtgatgtgactgaagaagaaggtaacattgttatttatactgaacctactgaccttcataaaggaatcgcggctctaaaagcagctggaatcactgagttcagtacaacagaattagaaatgattgctcaatctgaagttgagctttccccagaagatttagaaatctttgaagggcttgttgatgcccttgaagatgacgacgatgtacaaaaagtttatcataacgtcgcaaatctctaattatcttttaaagaaatctgtctttacggcagatttctttaatctcatataattcttataaaaaatataatattcaactcgtcatattgattatacccccccgttcccagagaaataatatttattaaaattccagttcttctttttctgattacagaaggcaaagtggcaattacgcatagtttcccgataaagacgcgatagcgacatcccgcataaggcatttttctctttatctttgtacggtacttcatggaacagagtttttgaccttgcgaatcgtgatgtctgttggggagggacaatttgctcactgaagcgtgagactcgattaagcgcacgaaacacagaaatcaaaaaacccggtcacttttttacaaggtaaccgggtaaaaataatttttattttttaactgttttgagactcatagagatgtctcaaaactaaaatttggctcctctgactggactcgaaccagtgacatacggattaacagtccgccgttctaccgactgaactacagaggaatcgtgagaacgaggcgaatattagcgatgcccacccacaatgtcaaagcctgttttttaaatttgaaatcgtttgctgaaataatctgcattttgtcgtttattcgctcacaactggctttttttcacacttttgcggctcgggtcgagggtatttccatagccaacgtccagtaaccattcgccagtaaaacagcacggcccgcacagcccagtcggcaaacattcccatccagacaccaaccacaccccagccaagcatgattcccagcacataaccgactacaacccgacaaccccacatgctcaacatgctaacccacatggcgtaacgggcatcacgagcacctttaaatccagcgggtagcacccaactggcggaccaaataggcataaataaagcatttagccaaatcagaatcacaacgacatgtttaacctgtggatcctgggtgtaaaagcttgccataaccccggcaaagggagccgttagccaggcgatggccgttaatccaagagtggaaagccagaacacatgccgcaactgaatctctgcttgcgctatctgccctacccccaaccttcggcctgtaatgatcgtagaagcagagccgagcgcacttccgggtaagttgataagagccgcaatactaaacgcgataaaatttccggcaataacactggtccccatcccggcaacgaacatttgggttaataaccgaccactggtaaataacacactttcgacactcgcgggaataccaatccccatgacttcccagataatgctaaaattcagcggtttaaaatagctctttaagctaatccttagcgcaggattaaaaccaatcgccagcacccacaaaattgcaactgcgccaatataacgagaaatggttaaacccagccctgccccgacaaatcccagtcccggccaggagaaaaggccgtaaatcaatatgccgctaataataatattaagaatattcaggctaccgttaatcaatagcggtattttcgtattccctgcaccacgaagtgccccgctaccaataagagtgatggcagctgctggataactgagtaccgtcagctccagataagtcaacgccagtgctttaacttctgtcgtggcatcacccgcgacgaaatcaataatttgttcgccaaaatgatgaataagcgttgccaacagtacggcaaacaacgtcatgatcaccaaactctgccgcgtcgccaccctcgctcgtcgtcgatcccgcttaccgagactaaatgccacaacgacagtagtaccaagatcgatagcagcaaaaaaagccataatgaccatattgaagctgtccgccaatcccacgccggccatcgcatcttttcccagccagctgaccagaaaagtgctcagaacccccatcaacaggacacaggcattctccatgaagataggaacagcaagcggggttatctcgcgccagaacaacactttgtagctcttgcgtttagcgtgccagcgagtgccgtgaacaacctggcgtaaagcagaggagatattcaaagcgctccttaattgcagaaagtgaaaccacatttcaaataaactgggagaatcagcaaagctgcaaagattttcgccaacaaattgtctgcaaatgcaacaaactgtacttagaaacggcaaacagttggggaatttaaaaatcgggttactcaaaagatttttcgccgttaagatgtgcctcaacaacgattcctctgtagttcagtcggtagaacggcggactgttaatccgtatgtcactggttcgagtccagtcagaggagccaaattcctgaaaagcccgcttttatagcgggatttttgttatatctgataatcaatttcctcttcactgctttccatcacctgccgcttgatatcctcaacactcagtcctgcattacaaagttccagaaagcgccagacatagttacgctgaagttgtcctcgcttcagtcccaaccagacagtattagcatcaaaaagatgccgcgtatccaggcggattaaattctcttcctcttgttcgccactggattgctcggcaactaatccgatcccaagcccaagagcaacataggttttaatgacatcagaatcctgcgcacttaatacaatatctgccagcaaacctttgcgggcaaatgcgtcatcaatacgactgcgccccgtaatcccctgtcggtaagtgattaacggccacttcgctatactttccagcgtcaatggactaatttgcgtcaagggatgatcgtgtggaacaagcaaactatggtgccaacgaaaccacgggaaggcgacgagctgcgggtcattactcaaacgctcgctggcgataccaatatcagcttcgccattttgcaacaatgtcgcaatttcctgtggcgtcccctggattagctcgagccgaacctccgggaaaagttcgcgaaaagctttaatgacctctggcaagctataacgtgcctgagtatgcgtcgttgcaatagtgagaacgccagacgtatcgttggtaaacaggtctgcaagccgacgaacattactggcttcattcagaatacgttctgcaatgaccagtaatgctttgcccggttcagtcatgcccagcagtcgcttacctcgtcgaacaaatatttcgatgccaagttcatcctccagttcccgaatatgacggctgacgccactctgactggtaaaaagcatattcgcaacctctgtcaggttgtaatcctgacgtgcagcctcgcggattatctttagttgttggaaattcacggtaaactccgggcagttcagatttcccgttattgttaaagtctaatgcccggcataacaaataataaaaacccgcatcttattccatcccgatataacacttagctcaccaattgccactgccttttttccatcactggagaactaatcacactcattaacaactctttcactgcctgtgcctgtgggcttaagttcgctctggcgggtaaatttaaactcaaagagagactcatggaaggagtggtaatgcgactcatccacccatttactgcgccacataagctacgcgcggcgctttcgggtaatactgcaacgcccatgccgctggcaatcgctgcggtaagcgtggcaatagactcaatttcaccaataacttttgccgtgagtcgccgtagggaaaaagcctcatcaacacgaagtctaatagcactgtaatcactggggagaaagaggttcatttgcgcaatagcattcacatcaacgctttgccccgggcaatcttgagttcctaccagaaaaagatcttctttcagcaaagcctgactggatacaccagccacaggggaatgctcataaatcaccgccatatcgagttggtgatttatcaatttttcgttaagcactgcaccactattttcatgaagatagataacgatctccggaaattcagcgcgaaccgcctgtaataagggcatggtgatggaactcgcagcggttcctggtgcaaagccaatgctgacttgcccgcttaatgcctgaccaacgttatgcaccgccagttgggcctgttcacactgacgtaaaatggcccgcgcatgggtatagagaatttttccggcgtctgttggtgtaacgccccgctttgtacggatcaaaagttgttgatttaactcaccttccagtgtggcaacctgctggctgagcgctggttgtgcgatatgcaatacttcagcagcctgggtcaggctaccaatatctacaatttttacgaagtatttcaggcgtctgaagttcatgttgcctccggtttttaagaatcggcccaagtgccgccattacttacaaccagattgcaagatgcttgccagttttattttggtgttgatgtacaagctaaccaactgtcaaataagagattatgatagattcgtcatttgctcctttaatcagctgtcgcgttcccctgccctataaaaggagggtatgcaccacgatggttcattacccaataagattgaaagctcaccactttgttgaaattgacagcaaacaaacaaaaaaatgcatttcaccctttgacatcaccatgcactgccattaatatgcgccccgttcacacgattcctctgtagttcagtcggtagaacggcggactgttaatccgtatgtcactggttcgagtccagtcagaggagccaaattcaaaaaagcctgctttctagcaggctttttgctttctaattaccaacgctcttaaaacatctgtctactaccagaactaatttgcacaggcattccgcttcgacgttgcaacgcagcatttgcgcgatttacatcaacttcttgcccgttgataaacgcccgcaaagatggggttaccggcaatggcacttttcggtcagactcatattctgcacgattgcggctcaatggctcatgaacttccagccagttgctgccatctggttcagtggtgtattttactggctggtcgataatttgcacacgcgtcccaacaggaacattatcaaacagatatttgatatcgtcattgcgcagacgaatacagccctgacttacccggagcccaataccaaaattggcattggtaccatggatggcatacaacctgccaatataaatcgcgtacagccccatgggattatcggggcccgcaggaacaaatgcgggcaaactctcccctcgtttcgcatattcgcgccgagtgttcggcgttggcgtccaggttggagcttcttgtttacgttcaacggtagtcacccagttacgcggggtttctcgcccagcctggccgataccaataggaaagacttccacagtattactgtctggtgggtagtaataaagacgcatctcagcgacgttaacaacaatccctttacgaacagtgtcgggcaaaatcagttgctgcggaatggtgagttggctgccagacttcggcaaaaaaacatcagcgcccgggttcgcttccagcatgttacttaacccttgcccgtattgtgcggcaaaagtctccagcggctgggtattgtgatcaggaacagttacagtaaagctctgccccactaaacggctaccctctggaggtaatggataagttaccgccaggctagtatggctggcaaaaagcagagcaaaactgcaaagaatatttacacgacgcatcatgtccctttcctatgtcgcgaaagctatccgttaagtatagcttttatcagacttttcgtttttaactgttcaaatcagaagtcgtattccccggtagaacaatattactggcagcaagttcgcccatgttgttgtatatcgcacaggcagcttcgatgatgggcatcgccagagctgcgccactcccctcacctaaacgcatctccatattgagataaggctccagccccaaatggctgagcgctatacgcgcgcctttttctgcgctcaggtgagaaggaatgagatacggtttgatcgcaggagacatctggcaggctgcgagcgcagcagcataagaaagaaatccatccagcaacacgggtaaaccgcaggaagcagcacctaacatcactccagctattccgaccaaatcaaatccacccacttttgccaggacatcaacaccatcctgaggatttggttgattcaacgtaatcgcccgacgcacaacatcaattttattagccagtttatctgtcggcaggtttgcgccaatcccaaccacttcttcaggatcccggccagtgattgtgctgactattgctgctgccggtgtcgtgtttgccatccccagttcacctacaccaaacagcgtgacaccgttttttgccagctcctgcgtataacatatgacgtccaaaagcaacttttcagcctgacggcgactcattgccggagcactagcaatattgccgctacctcgtgcgacacgcatgttgataagcccggggataggctcagcagtatcaataccaacatcaattacgtggacgttagcgcccgcttgttctgccagcacacacacgccggttgttccacgggtcatattttcagcctgtatggctgtcacttcttttggagaaatagcgaccccttcctcccagacgccgtgatcggcacacataaccagtaccgcttttttgcccacatgcggtatgccattcaaccccggcattcctgccagttgtatggcaagcacctccagctttcccaggctaccaacaggtttgagtaacccgtcaatatgccgttgtgcacggctcatagcggtagaatcgatggctgggatcgtattcagtaaatcggcaagtatttgcatctcacgtctctttatagcagtgccagcaggaagaccagttcaccaagctctatggctgctcccagcgtatcgcccgtttgcccgcccagcgtacgtttgagaagctgaccgaggatgaaaatcgccaccatcgtcaccaccatagcagccacaccatgcatacccggcaataatacggcagcaaaaatagcggctaagccgagtgtgacgcaggtttgtcgcccatcaattttgccaatgaacacattgccaagcccttcttcccgcgcataacgatgacgatacatcaataatgcggcagtcccgcggctgaccgcacatgctgccgccaggcttgcaaggatgctttcgccacgcagagccaactcgcttaacaccagaatctttgccagtaccacaaaaatcaatgccagaccgccgtgggtgcctaaacggctatcacgcatgatttccaacatgcgatcgcggctacgtgcagaaaatacgccatcacaggtatcagcgaggccgtccagatggaatcccccggtcatcagcaccagcacaagtacgctaaacagtgccgccagtggtgcgccacaccatgcctgcagcaccatgaagaccagcccgctaatcgcgccaagcaataatccaatcaaaggaaaagtaataataccgcgagaataatgctcgaaatccagtccctgggaccagcgacgcggtacaggcagacgcgtaataaaactgagcatcgcccaaaataatttactcatttgatttttactccaataccgctaaccaccagccatacttcatttgccgcagcggccaactgctgatttacccgcccggcaatatcacgaaaatgtcgtgccagacgactctccggcacaatccccattcccacttcgttagtcactaatacaacctttgcggggcaacgttggcaggcagcaatcaagctctgaatctcagcattaatcgcctgttccatcgcctgataatcccattcatcagggtctttatcgccgccataatcaaacaacagattagtcaccattgtggtaacgcattcaagcaacacaacctcattcgggttaatgtctgcatgaattaattcatcaagatgttgccagcgctccactgtgcgccagtgctccgggcggccttgccgatgatgttctatccgtgcagccatctcatcatcaaggatttggctggtagcgatatacagaacctgactagagtccccaataagcgcctctgcgtggcgactcttcccgctccgtgcgccccccgtcaccaaaatcatcataccgactcctgattcaaatgtatgatggtattcattgaacagaacaatggatcccccaccgttgctgaccgcaaaacatttacgcgattaatactgcgcgtaatataattaaaaatccagcattctcaatccattacgaaataagatggcattacggaatagccagactttctcgtgttaacgtccgacaaaatgcgtcattgacagcggtttctgtggattgacacatttcattcagataatgaattaatgctactgccggaacaaccagcaaacgggcattgtgttctgaaatccaggctattgattcaacgtcagcgacagatctgcgctgtaaaagaacttgtaaaacaacgtaatagaattatccggaatggtggcgactatgcactagggaaggtgcgaataagtggggaaattcttctcggctgactcagtcatttcatttcttcatgtttgagccgattttttctcccgtaaatgccttgaatcagcctatttagaccgtttcttcgccatttaaggcgttatccccagtttgcagaaactccgtaatgagattaaaagcgctcataactcatctgtcggccagaaggcgcgcctctgaattatccgacggacaaaccgggaacagtgtaatttcccggcaggagcgaaaaaattgaaaggcgcatcttactcttttcgctttcaaaaaaaagagtggtcatcgcgttaacacaccgccctgagatgaattagtgatgttttggctgcaccgcaacatacatttcgatatcccagtacccatcttccgcgccattgttcaaataaacctcgaagcagggctttggtaacatttcataagcactgtcctgcaagagactattaaagaactgataccagggtttagcaaaatcatcaccgactacacgagctaccgccaccgcatactgaccacctgtaatttctgtcagaatgacgccctcactgttttcgggaagcgtaaagtaacccggcaccgtcacgacggtgtcgcagcgtaatttttcggcgggtgtttcatctggattgtcgtaatagacagcaacccactccttcggcacaatatttttgctatctacccacatcatcaactgctcaaagcctttctttaccgtctgttcccacgggccaacgagatggaaacctgcaacggtacgtttctcttcctgcttaatctcgtagttcatgacgcctccattgatactgtttttatatacagtatagttgcaaaattaaaaccacaaggaatgagtgttgattatgcgagcagactcgcactcctgccagtctgctgcaaaagaaaggtcaggccttatggtggaaataatcactcaggcgagaaaacatgctgccttccccgacagattccagggtaaccagcggccagtgcgccacctgtttatcacggtcgtaaagttcaatttcccctacccgctgatgggcgctaattggcgcggtgagttctttaccatcaagggtatatttggctttgatatgtggaatttcggctttcggtagcaccatccagaactcttgttccgttcccaggtcgatattttctttatcgccataccagatgcgttccgttccgacctttttcccacggtgcaaaatttgcaccgtagtaaagttttgttgcccccaacgcagtaattttcttgcctcttcctcacgaccttttgcactgtcagcccccattaccactgcaatgagacgacgctgcccatctacagcgctagcaatgagattaaacccggcaccagaagtatgacccgttttcaggccgtcaacattcatggttttatcccacaacaacccgttacggttttgctgggtgataccgttccaggtgagacttttctcactgtacatatgataaaactcgggctcgccgtggatgatagcacgagaaagcacagctaaatcataagcgctgctatgctggccaggtgcatccagaccatgcactgtttcaaaatgcgtatccttgagatgcagcttctcggcatagttgttcatcatttcaacaaactgccgttgcccaccggcaatatagtcagccagagcaacacaagcgtcatttccggaatccacaattaaaccacggcttaaatcacgtacgcttacgcgatcgccctctttcaaaaacatcagactagaaccgacaaacaccggattatctttcgcccacgcatcgcgccccacggtgacaatatcgtctggcgtaatgcgatgactatcgatagcgcgatccacgacataacccgtcatcagctttgtcaggctggcgggattgcgctgttgatgctcattacccgcggtgaggatctgaccggtggtgtaatccatcaatacccaggacccggcatgaatctctggaggctgaggactaaaaggaatgttttccgccgcaaaaccagagcttaagttaaaaacgaacaaagaagcagcaataataagacggcgtttcaacagcaaaccctcaggagtttcaaatagctgttctttttacggaaatacttatgaactggctggaataaagtgcaagaaaatgtgactaccctctcatttttatctgacatgatctgttgccactcgctgccaaattgtggcgctaaagctgattagcacggtgatatttgatactctggcagacagcagaaataacggatttaacctaatgatgaatgacggtaagcaacaatctacctttttgtttcacgattacgaaacctttggcacgcaccccgcgttagatcgccctgcacagttcgcagccattcgcaccgatagcgaattcaatgtcatcggcgaacccgaagtcttttactgcaagcccgctgatgactatttaccccagccaggagccgtattaattaccggtattaccccgcaggaagcacgggcgaaaggagaaaacgaagccgcgtttgccgcccgtattcacagcctttttaccgtaccgaagacctgtattctgggctacaacaatgtgcgtttcgacgacgaagtcacacgcaacattttttatcgtaatttctacgatccttacgcctggagctggcagcatgataacagccgctgggatttactggatgttatgcgtgcctgttatgccctgcgcccggaaggaataaactggcctgaaaatgatgacggtctaccgagctttcgccttgagcatttaaccaaagcgaatggtattgaacatagcaacgcccacgatgcgatggctgatgtgtacgccactattgcgatggcaaagctggtaaaaacgcgtcagccacgcctgtttgattatctctttacccatcgtaataaacacaaactgatggcgttgattgatgttccgcagatgaaacccctggtgcacgtttccggaatgtttggagcatggcgcggcaataccagctgggtggcaccgctggcgtggcatcctgaaaatcgcaatgccgtaattatggtggatttggcaggagacattagcccattactggaactggatagcgacacattgcgcgagcgtttatataccgcaaaaaccgatcttggcgataacgccgccgttccggttaagctggtgcatatcaataaatgtccggtgctggcccaggcgaatacgctacgcccggaagatgccgaccgactgggaattaatcgtcagcattgcctcgataacctgaaaattctgcgtgaaaatccgcaagtgcgcgaaaaagtggtggcgatattcgcggaagccgaaccgtttacgcctagtgataacgtggatgcacagctttataacggctttttcagtgacgcagatcgtgcagcaatgaaaattgtgctggaaaccgagccgcgtaatttaccggcactggatatcacttttgttgataaacggattgaaaagctgttgttcaattatcgggcacgcaacttcccggggacgctggattatgccgagcagcaacgctggctggagcaccgtcgccaggtcttcacgccagagtttttgcagggttatgctgatgaattgcagatgctggtacaacaatatgccgatgacaaagagaaagtggcgctgttaaaagcactttggcagtacgcggaagagattgtctaatttgaagcctccgccgctggtacggcggaggacaatgttgagtcaggctttttgaacggtgatgctccacgctgcatcgccaatctgctgataatcggtgatggcatgtccttcttctgccgcccactgtgggattgcttcagttgcctgggtgcaatcaaactcaatcactaactcatcgccgctgaccatttctgccagagctgcttttgcttctatgagtggaaacggacagacctgcgtcaccacatccagctttttaatcaccatctttacaccttacttaatttgccgcagcagttgccagtcgcgccttacgctgcggtcgaacatacacaagccaggacgcagtccagactccgagaatcataaatacaaggccaatccagccctgccaggtcatcattgcagtcataaccagtccattaccgatagagcaaccacctgcaatactggcaccgaagcccatcagtacaccacctaacccgctacgtaatgttgtttgtgcatcagctgcgcgaacgcggaactcacggctcgctttggctgcaataaaactccccacgaagatccctaacaccaggaaaacgccccagttaatgtatttcatgtcacccgcgaccagaaattgcagaatattggccgttggggaagtgattcctaacccaaacatgcgtccggttgcttcactcaggggccaggctaaaagcgcaatcaaaccgatgagtacagctgtgacaaagggatgccagcgtttttcaaacagaatatgagcgatcccggttcggcgcggcggtaaggtcgcgactttgagttttggcttcttcaactctttcatcaccacccagagcgttatcaccagcaaaacggcaaccaacggccacacagacaaattaaaagtctcagcaatagagttatgttcagtactgtagtgctgcaaggtttgatttaaaccactggcatgtggagaacgcatcaccgcactcatcaccatataagtgaaaagcgcgatccaactgccgatcaatccctcacccgcgcgataccaggtcccggtggcacatccacccgccagaacaattcccagcccgaagatatacccacctataacagtaccaagccacgggaacgccccggcttcgtaagtcagtaggcccgcctgaattaacgcaaaaacccccacgctttgtacgctaattgcaatcagcaaggcgtaaaacatgcgattatttttcacgatatacatatcgcgaaaaccacctgtcaggcaaaaacgcccacgctgcatgacaaatcccagcagagcaccacaaattagcccgcttaatatcatactaaacataaattaattaaccagatgaatgttaatgaggaaattattcatgactggtggaatgcagaccaataaccaaattctctaaattagaacaaatggttattaatgaggagttcgatacaaaagaataaaaaaaccggagccaaatgttcattcgactccggtttattattagaaaagatgattatgctacgtcttcgtactgcggaaccggattacggaagctcttggtgacgcaagccaggtaaatcagaccgatagcagcccagatcagacccagaaccatactgctttcttccaggttaacccacagcgcaccaacggtcagcgcaccacacatcggcaggaacagatactggaagtgatctttcagcgtcttgttacgcttctcacggatccagaactggctgatgacgctcaggttaacgaaagtgaacgccaccagcgcaccaaagttaatcagcgccgttgccattaccaggtcgaagttgattgccagcagggcaatcgcgccaaccaggatgatgttcatcgccggagtacgccatttcgggtgtacataaccgaagaagcttttcgggaatacgccgtcacgacccattacgtacatcagacgcgctacgcctgcatgcgccgccataccggacgccagtacggtaatggtggagaagatcagcgcgccaacctggaacgctttacccgcaacgtacagcatgatttcaggctgactcgcatccggatctttaaagcgagagatatccgggaagtacagctgcaggaagtaagttgcaaagatgaagatcatgccgccgatcagcgcggtcaggaaaatcgcacgcgggatcacgcgctctgcatctttggtttcttcgctcaggttgctgatgccgtcaaagccggtaaaggagaagcacaggattgtcgccccggtaatcatcgggataacatgcgcatcgccagaccagaatggacgagtgctcgccagcgtaccagcgccttcaccttcaaatacgccataaacaaccatgcccagaatcaccgcgatcagcactacctgcaacacgacgattacagtgttgaagttcgctacggatttcagactacgcaggttaaaggcggtcataaaggccaccagcgccaccacaaacatccagcttgggatggaaggcaccagagcttcaaaatagattttcgccagtagaatgttgatcatcggcgcgaacagatagtcgagcagagaagaccaacccaccataaagccgacagtcgggctaatggatttctgggcgtaagtgtatgcagagccagcagaaggatagcggcgaaccagcttcccgtagctcagagccgtaaacaggatcgcaatcaatgcgaacgcataggctgtcggcacatgaccatccgtgaggccactaacgataccaaaagtatcaaacagcgtcatcggctgcatataggcaagacccatcattacaaccggaactaacgtaagcgttttacgcaattccacgcgagaggtgtttggagtaacgttatggctcatggtcattctcctttacggtgataaccgtcgcgtaagcaaaaaattgccccatttttttggattcctcagcgacaacaactgtcgatttttagtaaatatctatccggtacgaagcccggcctcttggtatgaatgattggtttgaagcaaaaaataaccgacgctgatgaaacgtcggtttttagtcattttttgacagcggcgcattgtgcctaaatgggggggaaatgacaagagaatgagaggcttgtcagaataatttttctttaaatggcactttttccgtcatcagattttgcataaacaccggcgatcgcactatttgctaaaatttcatcccgccaccagccactggcaagtcctgcggtctgttcgttccagccaatccagacgggttcaaagagagtttgggcgaccactttcttctcgattaacgcgccactatcgagaaaacgttgcgccagataacggggtaaatagccgcagccgaggccgctaatttgcagctccagtttggttttaaaatcgaaaacggtaatggcttcttgttcgtcgagaagttgacttgccgtagaagcgcctgcctgcgcagtatcccccaccacaatcgcccgatatcgcttaataatacgacgatttaacggctcttcttccagggctaacggatgatgaggcgcgaccgcaaagacttgttccagatcgcccaaccgactaaaaccaaactcactggaagatggtggctcatgcatcgcgccaacaataatatccgctcgcccctgagtcagggcatcccaactaccaccgagtacgccattgataaacttcaggcgcgtcacgctatgatgttgataaaaagcttcaatgagtggcgcaagcagagaaaaaggaaacgtgtcgtccacgccaatcaccagctcgttttcccagccttcatgcagtttgatcgcctgcttttccagttcccgcacggtatgcagaacttcccgccctttctctaataacatttttccggtgcgggtgaatttagcgcggtgtccgctacgatcaagcaattgaatattaaggtcgctttccagcttgtgaacggtgtaactcagagcggacggcgtcttgtagagtttggcgctcgccgccgcaaaactgccttctttttctaaggcatcgaggatcatcaacacatccagcagtggtttcatacacgcccccttgcagtgcatgcggcgtcctgctggcgtgatcgtttactccagcggcattaccagcggatcgggatactggtattcaaatcccagttcattacaaatccgactgccatcaataatcttacctttgccgctgtccagactatttctgaactgcggaggttccagccccagtaaacgggccatctgcggatagaaaacattacgcgcagggtgagctggcgcacatatattatagatgtgtccgcctttaggtgcctgtaacaacagagtgatagcgccaataacatcttctaaatggactaaattaacaccatgttcaccatcaggcgcggtttttccggcaaagaagcgtccgggatgacgtcccggtccgaccaggcccgcaagacgcagaatatcgacgctagtaccgggtaaattgtgcagccagtcttcgagttcttctaatactcgtccactgttggttactggattacgcggggtggtttctttcaccgtgccttgcgcgtcgccatagacagatgtactgctggtaaaaataatgcggggaatacgatgggccagcgcgctatccactaactcttgtaccgcttgtaaatagaactcatcgccggggccgctacgacgtgccggaagcgtaatgaccagcgcatcggcatccatcagggcatccagatcgtcagaatcgcaaactagctcaggctccatgcgaagcagatagctatcaatgccactcattcgggccgcttcgacaccatcttgtgtggttttactcccggtgacttgccagcctcgcgcactaagactcatcgccagcggcatgcctaaccaccctaacccgacaattgcgacctttttcatccgttatctcctgatacaccttagatctataaggctacgctagcgtatcaaaactgacaattcattctatgaatgaatctgttcaataatgataacgacatgctgcaatgagcagactatcgtcggtaaccgcgtataccagacggtgctcctctgtaatgcgtcgggaccagaaaccactcaaattatgtttcaggggttctggcttccccttaccttcaaatggcgttctgcgggtatctttgataagttcattgatctttttaacaattcgcttatctgtttcctgccagtacagataatcgtcccaactttcctcagaccagattagtttcactcaatgatgtccttttccgttcctttgccacttttcaggctatcgatactgtccatcaatctccgggcgttagcgggggagcgcagtagataagccgtctcttccaggctgttgtattcttcgagactcatcagaacacaagcctctccattctgacgagtaataaggatcggggcatgatcttcaacggctttcatcattgttgcgctcaaattctgacgcgcttcgctgtagctaattgtacgcatgtcaatctcctcttttgtacagttcattgtacaatgatgagcgttaattaactatttattaattagtttgtagatcaaggtattgtcagtgagacgaaaatccaggcttcgctatttttggtgccatcagctaagaggacagtcctcttagccccctcctttccccgctcattcattaaacaaatccattgccataaaatatataaaaaagcccttgctttctaacgtgaaagtggtttaggttaaaagacatcagttgaataaacattcacagagacttttatgacacgcgttcaatttaaacaccaccatcatcaccatcatcctgactaatctttcaggcgatgtgtgctggaagacattcagatcttccagtggtgcatgaacgcatgagaaagcccccggaagatcaccttccgggggcttttttattgcgcggttgataacggttcagacaggtttaaagaggaataacaaaatgacagacaacactcgtttacgcatagctatgcagaaatccggccgtttaagtgatgacagtcgcgaattgctggcgcgctgtggcattaaaattaatcttcacacccagcgcctgatcgcgatggcagaaaacatgccgattgatattctgcgcgtgcgtgacgacgacattcccggtctggtaatggatggcgtggtagaccttgggattatcggcgaaaacgtgctggaagaagagctgcttaaccgccgcgcccagggtgaagatccacgctactttaccctgcgtcgtctggatttcggcggctgtcgtcttagcctggcaacgccggttgatgaagcctgggacggtccgctctccttaaacggtaaacgtatcgccacctcttatcctcacctgctcaagcgttatctcgaccagaaaggcatctcttttaaatcctgcttactgaacggttctgttgaagtcgccccgcgtgccggactggcggatgcgatttgcgatctggtttccaccggtgccacgctggaagctaacggcctgcgcgaagtcgaagttatctatcgcagcaaagcctgcctgattcaacgcgatggcgaaatggaagaatccaaacagcaactgatcgacaaactgctgacccgtattcagggtgtgatccaggcgcgcgaaagtaaatacatcatgatgcacgcaccgaccgaacgtctggatgaagtcatcgccctgctgccaggtgccgaacgcccaactattctgccgctggcgggtgaccaacagcgcgtagcgatgcacatggtcagcagcgaaaccctgttctgggaaaccatggaaaaactgaaagcgctgggtgccagtagtattctggtcctgccgattgagaagatgatggagtgatcgccatgagctttaacacaatcattgactggaatagctgtactgcggagcaacaacgccagctgttaatgcgcccggcgatttccgcctctgaaagcattacccgcactgttaacgatattctcgataacgtgaaagcacgcggcgatgaggccctgcgggaatacagcgcgaagtttgataaaaccacggttaccgcgctgaaggtgtctgcagaggagatcgccgccgccagcgaacgcctgagcgacgagctaaaacaggcgatggcggtggcagtaaagaatattgaaaccttccacactgcgcaaaaactgccgccggtagatgtagaaacgcagccaggcgtgcgttgccagcaggtcacgcgtccggtagctagtgttgggttgtatattcctggcggctccgccccgctcttcagtacggtattaatgctggcgactccggcgagtattgcgggctgtaaaaaagtggtgctgtgcagtccgccgccgattgccgatgagatcctttatgcggcgcagctgtgcggtgtgcaggacgtgtttaacgtcggcggcgcacaggccattgccgcactggcgtttggtacggaatctgtgccaaaagtggacaaaatcttcgggccgggtaacgcctttgtcaccgaagcgaaacgtcaggtgagccagcgtctggacggtgcggcgatcgatatgcccgcaggcccgagcgaagtgctggtgattgctgacagcggcgctacgccggatttcgtggcttctgatttgctctctcaggctgaacacggcccggacagtcaggtgattttactgacgcccgctgctgatatggcgcgtcgcgttgccgaggccgtcgaacgccaactggcagaactgccgcgtgccgaaaccgcccgccaggcactgaacgccagccgcctgatcgtgactaaagatttagcgcagtgcgtggagatctccaaccagtacggcccggagcacctgatcattcagacccgcaacgcccgtgaactggtcgatagcatcaccagcgccggtagcgtatttcttggtgactggagtccggaaagcgcaggtgattacgcctccggcaccaaccacgttctaccgacttacggttacaccgccacctgttccagcctcgggctggcagatttccagaagcgcatgaccgtacaggaactgagcaaagaggggttctccgcgctggctagtaccatagaaacactggccgccgccgagcgcctgaccgcccacaaaaatgccgttactttgcgtgttaacgcccttaaggagcaagcatgagcaccgtgactattaccgatttagcgcgtgaaaacgtccgcaacctgacgccgtatcagagcgcgcgtcgtctgggcggtaacggcgatgtctggctgaacgccaacgaataccccactgccgtggagtttcagcttactcagcaaacgctcaaccgctacccggaatgccagccgaaagcggtgattgaaaattacgcgcaatatgcaggcgtaaaaccggagcaggtgctggtcagccgtggcgcggacgaaggtattgaactgctgattcgcgctttttgcgaaccgggtaaagacgccatcctctactgcccgccaacgtacggcatgtacagcgtcagcgccgaaacgattggcgtcgagtgccgcacagtgccgacgctggacaactggcaactggacttacagggcatttccgacaagctggacggcgtaaaagtggtttatgtttgcagccccaataacccgaccgggcaactgatcaatccgcaggattttcgcaccctgctggagttaacccgcggtaaggcgattgtggttgccgatgaagcctatatcgagttttgcccgcaggcaagcctggctggctggctggcggaatatccgcacctggctattttacgcacactgagcaaagcttttgctctggcggggcttcgttgcggatttacgctggcaaacgaagaagtcatcaacctgctgatgaaagtgatcgccccctacccgctcagcacgccggttgccgacattgcggcccaggcgttaagcccatagggaatcgtcgccatgcgcgaacgggtagcgtaaattattgcagaacgcgaatacctgattgccgcactgaaagagatcccctgcgtagagcaggttttcgactctgaaaccaactacattctggcgcgctttaaagcctccagtgcggtgtttaaatctttgtgggatcagggcattatcttacgtgatcagaataaacaaccctctttaagcggctgcctgcgaattaccgtcggaacccgtgaagaaagccagcgcgtcattgacgccttacgtgcggagcaagtttgatgagtcagaagtatctttttatcgatcgcgatggaaccctgattagcgaaccgccgagtgattttcaggtggaccgttttgataaactcgcctttgaaccgggcgtgatcccggaactgctgaagctgcaaaaagcgggctacaagctggtgatgatcactaatcaggatggtcttggaacacaaagtttcccacaggcggatttcgatggcccgcacaacctgatgatgcagatcttcaccagccaaggcgtacagtttgatgaagtgctgatttgtccgcacctgcccgccgatgagtgcgactgccgtaagccgaaagtaaaactggtggaacgttatctggctgagcaagcgatggatcgcgctaacagttatgtgattggcgatcgcgcgaccgacattcaactggcggaaaacatgggcattactggtttacgctacgaccgcgaaaccctgaactggccaatgattggcgagcaactcaccagacgtgaccgttacgctcacgtagtgcgtaataccaaagagacgcagattgacgttcaggtgtggctggatcgtgaaggtggcagcaagattaacaccggcgttggcttctttgatcatatgctggatcagatcgctacccacggcggtttccgcatggaaatcaacgtcaaaggcgacctctatatcgacgatcaccacaccgtcgaagataccggcctggcgctgggcgaagcgctaaaaatcgccctcggagacaaacgcggtatttgccgctttggttttgtgctaccgatggacgaatgccttgcccgctgcgcgctggatatctctggtcgcccgcacctggaatataaagccgagtttacctaccagcgcgtgggcgatctcagcaccgaaatgatcgagcacttcttccgtagcctcagttacaccatgggcgtgacgctacacctgaaaaccaaaggtaaaaacgatcatcaccgtgtagagagtctgttcaaagcctttggtcgcaccctgcgccaggccatccgcgtggaaggcgataccctgcccagcagcaaaggagtgctgtaatgaacgtggtgatccttgataccggctgcgccaacctgaacagcgtgaagtctgccattgcgcgtcacggttatgaacccaaagtcagccgtgacccggacgtcgtgttgctggccgataaactgtttttacccggcgttggcactgcgcaagcggcgatggatcaggtacgtgagcgcgagctgtttgatctcatcaaagcctgtacccaaccggtgctgggcatctgcttagggatgcaactgctggggcggcgcagcgaagagagcaacggcgtcgacttgctgggcatcatcgacgaagacgtgccgaaaatgaccgactttggtctgccactgccacatatgggctggaaccgcgtttacccgcaggcaggcaaccgcctgtttcaggggattgaagacggcgcgtacttttactttgttcacagctacgcaatgccggtcaatccgtggaccatcgcccagtgtaattacggcgaaccgttcaccgcggcggtacaaaaagataacttctacggcgtgcagttccacccggagcgttctggtgccgctggtgctaagttgctgaaaaacttcctggagatgtgatgattattccggcattagatttaatcgacggcactgtggtgcgtctccatcagggcgattacggcaaacagcgcgattacggtaacgacccgctgccgcgattgcaggattacgccgcgcagggtgccgaagtgctgcacctggtggatctgaccggggcaaaagatccggctaaacgtcaaatcccgctgattaaaaccctggtcgcgggcgttaacgttccggtgcaggttggcggcggcgtgcgtagcgaagaagatgtggcggcgttactggaagcgggcgttgcgcgcgtagtggtcggctccaccgcggtgaaaagtcaagatatggtgaaaggctggtttgaacgcttcggtgccgatgccttagtgctggcgctggatgtccgtattgacgagcaaggcaacaagcaggtggcagtcagcggctggcaagagaacagcggcgttagtctggaacaactggtggaaacctatctgcccgtcggcctgaaacatgtgctgtgtaccgatatcagccgcgacggcacgctggcaggctctaacgtctctttatatgaagaagtgtgcgccagatatccgcaggtggcatttcagtcctccggcggtattggcgacattgatgatgtggcggccctgcgtggcactggtgtgcgcggcgtaatagttggtcgggcattactggaaggtaaattcaccgtgaaggaggccatcgcatgctggcaaaacgcataatcccatgtctcgacgttcgtgatggtcaggtggtgaaaggcgtacagtttcgcaaccatgaaatcattggcgatatcgtgccgctggcaaaacgctacgctgaagaaggcgctgacgaactggtgttctacgacatcaccgcttccagcgatggccgtgtggtagataaaagctgggtatctcgcgtggcggaagtgatcgacattccgttttgtgtggcgggtgggattaagtctctggaagatgccgcgaaaattctttcctttggcgcggataaaatttccatcaactctcctgcgctggcagacccaacattaattactcgcctggccgatcgctttggcgtgcagtgtattgtggtcggtattgatacctggtacgacgccgaaaccggtaaatatcatgtgaatcaatataccggcgatgaaagccgcacccgcgtcactcaatgggaaacgctcgactgggtacaggaagtgcaaaaacgcggtgccggagaaatcgtcctcaatatgatgaatcaggacggcgtgcgtaacggttacgacctcgaacaactgaaaaaagtgcgtgaagtttgccacgtcccgctgattgcctccggtggcgcgggcaccatggaacacttcctcgaagccttccgcgatgccgacgttgacggcgcgctggcagcttccgtattccacaaacaaataatcaatattggtgaattaaaagcgtacctggcaacacagggcgtggagatcaggatatgttaacagaacaacaacgtcgcgaactggactgggaaaaaaccgacggacttatgccggtgattgtgcaacacgcggtatccggcgaagtgctaatgctgggctatatgaacccggaagccttagacaaaaccctcgaaagcggcaaagtcaccttcttcagccgcactaaacagcgactgtggaccaaaggcgaaacgagcggcaatttcctcaacgtagtgagtattgccccggactgcgacaacgacacgttactggtgctggcgaatcccatcggcccgacctgccacaaaggcaccagcagttgcttcggcgacaccgctcaccagtggctgttcctgtatcaactggaacaactgctcgccgagcgcaaatctgccgatccggaaacctcctacaccgccaaactgtatgccagcggcaccaaacgcattgcgcagaaagtgggtgaagaaggcgtggaaaccgcgctggcagcaacggtacatgaccgctttgagctgaccaacgaggcgtctgatttgatgtatcacctgctggtgttgttgcaggatcaggggctggatttaacgacggtaattgagaacctgcgtaaacggcatcagtgagttgcggggtaagcggatgcgatattgttgccgcatccggcaaaaaaacgggcaaggtgtcaccaccctgccctttttctttaaaaccgaaaagattacttcgcgttgtaattgcgtagagcattacgccccagcacaatccccgcgccaaccatgccacccagcagcaccgccagaatcaaggtaattgcctttttcgggctatcacgacgaataggtaacatcggtttcatcacataacggtaagcatgaatatcaagatcatcaacttttaagctttcgatatccagcaggttttgacgagtctgatagtagtttgggctgaacaccaacggacgggtcgcctcatgcttaatcatgctctccagcgcttcgctccccaaaaggaacaacgtatcttgtgtgatatcttcgccagtctgttgaatctgcggttttgtcacctgcgcctgattcgcatactgcaacgcttcctgaatctgacggatacgcagatctttctgctcctgcgcgactacttcctgcgttcttaaagagtcctgcaagtttttccgtcccagagcaatgttgtctttgagatccttttctagctcttgattcactttatcgtcaacttgctgaatgtattgggccaacttcatttgtgcgccctctgcagtttgcccaacataagaaacagtcaatggtaattgctggttcttaacagaaggttcgatggtaagtttttctcgttcttcctgattatccagcgtttctgctaatgcagagaaggcagaactgaagcgaccaattaacgtctcctgcaaatcgcttactttcggtgcagcctgaccatagataacattcatggcattgttatagccagcaatttgccccacgtcgggctgagtgataattgctgtactcgtccatttctccttcgctactgccaaatatccaatagccagggcaatagccacaatgacggaaatgatgattgtcatcttgccacgccacaactgcactagtaaatcaatcaaatcaatctgttccgggtcatggttttgcccagaaacattattattttctactctcatcattaccctaactgacggaaatttccaagtccgcatagtttagcgataatcctcgtgaatgctataggataagtgataaaaataatgaattgttgtgtaagtaacaaaagacaatcagggcgtaaatagccctgataacaagatgttagtcgctgccaaagagatcgcgggtgtataccttatctgccacatccttaagctcttctgccattcggttagagataatgacgtcggcttgttgtttgaaggtggcgagatcacgttccaggcgagagttgaagaaactgtcttctttcatcactggctcgtagatgatcacttcaacacctttcgccttgatacgtttcataatcccctgaatagaagacgcacggaagttatcactaccgctcttcataatcagacgataaatacccaccacttgcggcttgcgactcaaaatggcatcggcaataaaatctttacgcgtgcggttagcatcgacaattgcgctgatcaggttattcggcacagactggtagttcgccagtaactgcttggtatctttcggcagacaataaccaccataaccaaagctcggattgttgtaatggttgccaatacgtgggtcgagacaaacgccttcgattatttgacgggaattcagacctaaactttctgcatagctatccagttcgttaaagtacgccacgcgcatcgccaggtaggtgtttgcaaaaagtttaatcgcttctgcttcagtggagtcggtaaacagcatcgggatattttgcttaatcgcgccttcctgtaacagagcagcgaaacgttctgcgcgttcactacgctcaccgatgacaatacgactaggatggagattatcgtaaagggctttaccctcacggagaaattccggggagaatataatattttcagtgcgatatttcttatgcatcgctgcggtaaaaccaacgggaaccgtacttttgatgaccataaccgcataaggatttatctcaactacgtctttaattacactttctacactggatgtattgaaataattagttttaggatcatagtcggttggagtggcgatgatgacataatcagcatcccggtaggcttcatttttatctaatgtggcattaaagtgtattttatcactttgcaaaaactgctgaatttccttatcaacaataggagatatccgatcattcagcatagcaacgcgactcggtaaaatatctaatgccacaacctcatgattttgtgcgattagaagcccgttactcaagcctacatagccagtaccggaaatggtgattttcatttcatgctctcagaattaacttaactgtgaatcatgatgtttttagcatcctgataagagctaaaagttttaacgctacgttgttcgatggtcaacgcaacgaaaaacaattcagattttctttataagaatagctgatatttattaagttaatattaagcagtgaaatttagtctataagatatttggcaaaaaaaagcccggtgcaatatacgccgggcctcaattttattgttggttaaatcagattaatccagccattcggtatggaacacaccttctttatcaatacgcttataagtatgcgcaccaaaatagtcacgctgtgcctggatcaggttcgcaggcagaacagcagcacggtagctgtcgtaataggcaaccgctgcggagaaggtcggaaccggaataccgttctgtactgcataagcaacgacatcacgcagcgcctgctggtagtcatcggcaatttgcttgaagtacggagccagcaacaggttagcgatctgtggattttcggcataagcatcggtgattttctgcaggaactgcgcacggatgatgcagccagcacggaaaatcttcgcgatttcgccgtagttcagatcccagttgtactcttcagacgcagcacgcagctgagagaagccctgggcgtaagaaacgattttgcccagatacagcgcacgacgaactttttcgatgaactcagccttgtcgcctgctggctgtgcttgcggaccagagagaactttagatgcggcaacacgctgatctttcagagaagagatataacgtgcaaacacagactcggtaatcaggctcagcggttcgccgagatccagcgcgctctggctggtccatttaccggtacctttgttagccgcttcatccaggatcacatcaaccaggtagttaccgtcttcatcttttttggtgaagatatctttggtgatgtcgatcaggtaactgctcagttcaccgttattccactcggtaaaggtctgcgccagttcttcgttggtgaggttcaggccacctttaagcagagaataggcttcagcaatcagctgcatatcgccgtattcaataccgttgtgaaccatcttcacatagtgacctgcgccatcggcaccaatataggtaacgcatggttcaccgtcttcagctacggcggcgattttggtcaggatcggtgctaccaattcataggcttctttctggccaccaggcataatagaaggacctttcagcgccccctcttcaccgccagaaacaccggtaccgatgaagttaaagccctctgcactaagctcacgattacgacgaatagtgtcctggaagaaggtgttaccaccatcaatgatgatgtctcctttatcgagatatggtttgagggaatcaatagcagcatccgtgcctgcacctgctttcaccattaacaggatgcgacgaggcgtttccagagattcgacaaactctttcaccgtatagtaaggaaccagtttcttgcctggattttcggcaatcacttcttccgtcttctcacgggaacggttgaaaatagagacggtataaccacggctttcgatgttgagcgcaaggttgcgtcccatcactgccataccgactacgccgatctgttgcttggacattacatactcctgtcaggtgtgatcaccgcgctgaatgctcgcggcctggaatgttcgcaaataagtatacaaagtacttattaaagtataaatagcttatccatgcttatatgcttacggctttatatgtctccacatgcgatatttcttaaataatgttttattattaccacttttaattcagggataatgtgaggttattaccctcaaataatatgagataaatagtgctgcaacattgcatttttgccccgatttatccatgatcgaattgtgacatttgtcatacaacgaataggttttgtacttactatggaatggattgccgatccgtctatctgggccgggttaatcacgctgattgtgatcgaactggtcctcggcattgataacctggtctttattgccatcctcgccgaaaaactaccgccgaagcagcgtgaccgcgcacgggttaccgggctgctgctggcaatgttaatgcgcctgttactgctggcgagtatctcctggctggtcaccctgactcaaccgctgttcagcttccgcagctttacctttagcgcccgcgacttaatcatgctgtttggtggtttcttcctgttgttcaaagccacgatggagctgaacgaacggctggaagggaaagacagcaataatcccacacaacgcaaaggtgcgaagttctggggcgtggtgacgcaaattgtggtactggacgccattttcagtctcgacagtgtgattaccgccgtcgggatggtcgaccatttactggtcatgatggccgccgtggttatcgctatcagcctgatgttgatggccagcaagccgttaacgcaatttgttaacagtcacccgacgatcgttattctctgcttaagcttcctgttgatgattggctttagcctggtggcagaaggtttcggcttcgtcattccgaaaggctacctgtacgctgccattggtttcagcgtgatgatcgaggcgctcaatcagttggctatctttaaccggcgacgttttctttccgctaaccagacgctgcgccagcggactaccgaagcggtaatgcgcctgcttagcgggcaaaaagaagatgcggaactggacgccgaaaccgcgtccatgctggtggatcatggtaaccagcagatctttaatccgcaggaacggcggatgattgagcgggtacttaatcttaaccagcgtaccgtcagcagcattatgacgagccgccacgatattgagcatatcgatctcaacgcgccggaagaagaaatccgccagttgctggagcgaaatcagcatacgcggctggtggttaccgacggtgatgacgcagaagatttgctcggtgttgttcacgttatcgacctgctacaacagtctctgcgcggcgaaccgctcaacctgcgggtgttgattcgccagccgctggtgttcccggaaaccttgccgttgttacctgccctggagcagttccgtaatgcccgcacgcactttgcttttgtggtggatgagtttggcagcgtggaagggattgtgacattaagtgacgtcactgaaaccattgccggtaacttaccgaacgaagtggaagagatcgacgcccgccatgatattcagaagaatgcggacggttcctggacggcgaatggtcatatgccgctggaggatctggtgcaatatgtgccgctgccgctggatgaaaaacgtgaatatcacaccattgccgggctgttgatggagtatttgcagcgtattccaaaacctggcgaagaagttcaggtgggggattatttgcttaaaacgttgcaggtagaaagccatcgcgtgcagaaggtgcagattataccgctgcgtaaggatggcgagatggagtacgaggtgtgatggtatcggtcattttacccaatagccgaaaggaataagatgagggaaccgcgccatcggcgatttaccgccgggagcccgggttgccagggtggtggagattgagccaccctggcacgttcaccggcttgagcgttccatagtagcgaggaacatcaagtgaacggaacagccttcgatcttacatattcagaatataatgatgccgccacgaacgcctgatgcgacgctttacgcgtcttatcaggcctacaggactggtcacctggtaacttacatcttctccagcaacttcttcacatctttgccattacgggaatctttattccgctcggcccagtcattcaggcgacgtttcgcttcgtcctgtagatgtttgcgcagtaactgatccacttgcaggctgtaattgagttgctgccagttgccataaacccgcagcggtactggcgtttctttcaggaaatcaatcagtttgctttccccgttccagccacccacgacccgaatatcaaactgggtgtcgcaggtttgatctgccagattcaacatgccttcccctgtcagcgccagcacagggctttgaccttgcatgtcgtttaacgtcacgacgccatccttcaacgtcaaatcggtggtaaagcggtcaagccgcgtcacgttatcaaagttttcagcggccttcacatcaccgccattacgctctaccgcttgctgaatcatctgctggaagttcatcccttccatgcgcgtgtcggtcatttcgacatgtgcctgtccttgccagttgtggcggaatgcgtcggcatctatgtcagcaccggagaaatcaccagccagactcatttttccggtcaagctaatcggatagttaaacgccttcagaatggtaccaatctcaacgttttccagccgtggctggaagtttatccgcggatttatacttgtcgcgtccagcgtgcccggcagactaacctgtccaccgttaagtttgccctgcagttgagtaatttccagcaaaccgctcttgttggtcatttgcgtggcaacatctgtaaaattcattccgcgccagcgcacgttactggcctgcaacaaaatatcagccgtaaagccttgcagtccctgataggccggttcatcaatacggctagaaatgaccgggcgcggcaacgtactttggctctgcccctgctgcgcggcaccgttttcaccattcgcggtttcattaagcgggatgaggttgtcaagattcagttgcgggaattgcagcctcagctgccattccggtttctctgtcagcgtaacctgtgcttgcccgcttagcgtactatcattggcggtcaaactaatttggttaaaactaaggcgtttatgactctcctgccactgggcctggaaactcccctgcccctgaataccttgttttggtaaatcggcaccctgcaactgccagttaatttgttcaatagccgccgttaaatcatgcggataatcagaagcatctaccgtaccgttaagggatatcgtgagatcgcgctgatcgcgattaacccgcccggagaactcaaaactaccacgatgttggggatcttgttccatttgcaggcgaatattgcggattgtcacctgctcgtcatcttcatgctggaacaccagcacgctgtccgccaccttaagactggatatatcaaagctccatccgcgatcgtcactcagatccggcaaggtattgtcgcgcggtgcaaccggagcgtcttcactgcgcaccgcttccgtctgcggcgtcagttggatcactgccccttttagcatcacctgcttaacgctcagttgatgactcagtagtggtaaaagcgccacgtccagacgcatgttgtcggcgcgaaccagtggctggcttgcgccctgggcggtgagagacattcgcccggagaggatactaagctgcggccagacgtgccaacgcagtggcccgtcgagctgcaattgataaccgctacgtgcagcaacttgcttgaccatatagtcgcggaaatcattcggattcaccagcaacactaacgcagataacccggccaccagcacgaccaggagtatcatcagcgtcgtcagaaatcgtctcatggtatcctcaatgggcctgaattagtctttatcgattcggctggctaccgcgccctgctggttgcgatatttcgcatcttcacggcggttgtaaggtcgcaccgccgggccggaaagcggctcaaagctcagcgcaccaattaacatgcccggacgcagcgccagcggcagcttaccggagttgtagaactccagcacaatgcaaccagaccagcccggatcgatgcggtgcgcggtgacgtgcaccatcagccccagacgcgccagactggaacgcccgtccagccagcccaccagatcggctggcagcgtcacgctctccagcgtcaccgccagcgccagctctcctgggtgaagatagaacgcctcgccctcgtcgagaacgatctcatcgctcatcacgcggtcaagcgcggcgctcacttcatctttgggaccgctcagatcgataaacgctgccgtgtgaccacggaaggtacgaaatttattgcccaggcgtacatccaccgtcgcgccgttaatacgctccactggcggacgtgggttgatgctcaaacggccttcatcaagccaggcttcaatatctcggtcacacagacgcatggcattttctcctttcgcgcatcactcccttaacgccaattacgtcaagggcatactaggttatcactgaacggtacacaatttatcaagcttattcaaagaactgacttattttcgctttcaatatatcgatcgcgatgcggtttttcccgccgcgcggcacgataatgtccgcatattgtttagaaggctcaatgaattgcaggaacatcgggcgcacggttttttgatattgcgccatcacactatccatactacgcccacgctcgttaacgtcacgcttgatgcggcgcatcaggcagatatccagcggggtatcaacgaaaatggagaagttaagttcgtcacgcaaacgcgcatccgtcagcaacaaaatgccttcgagaatgatgaccttcttcggctcaaccgtcaccgtttctttcatacgcgtatgttcaacatagctgtaaaccggcaggtcaattgcgctgccgcgtttcaacgcttgtaaatgctcaagcagcagactgtgatccatcgcgctgggatggtcgtagttggtcttaacgcgttcttccatgctcagatggctttgatctttgtaatagcagtcttcgggaattacgccgatgtgttcatcaccgacttgctcacgcaattcacgataaagggtactggcaataagactcttgccggaagcgcttgcgccagcgataccgataatgacgcactgatgagactgatcagtcatatatttagcgacctgattaacctggatgttaggaagggggcgacgaagcgccaaacgcggcaattatagggatttcatccgtctgataccagtcgaatagcgttgccgcgcgctcagagttaattgttgacaaagaattcccgggggcaaattacgttgatcagttttatgtaaggtaaaaaatgttaaacgcagttgcgcaaattatccgcctttacgtcactttatgagcaattcgcatataaaatgtaaaacttttgtactagcataaacacagaaacgaatactggcgaccaggtcttgcggataaagcggtaatgagcaaacaaagtcagcatgtattaattgccctgccccacccgctgcttcacctggtcagtttaggtttagtcagctttatctttacccttttcagccttgagcttagccagtttggcacccaactcgccccactgtggttcccgacgtccatcatgatggtggcgttttatcgccatgccgggcgcatgtggccgggaattgcgctgagctgtagcctgggaaatatcgccgcatccatcctgcttttttccaccagcagcctgaacatgacctggacgaccatcaatattgttgaagccgtggtcggggcagtgctgctacgtaaattgctgccgtggtataaccccttgcaaaatctggctgactggctgcgtctggcactcggcagcgccattgttccgcctctgttggggggtgttctggttgtcctgctgacgcccggagacgatcctctcagggcatttttgatatgggtactgagtgaatccatcggcgctctggcactggtgccgctgggattgttatttaaaccacactatctgctgcgccatcgcaacccacggttgctttttgagagcctgctcacgttagccatcacactgacgttaagctggcttagcatgctgtatctgccgtggccttttactttcattattgtgctgttgatgtggagcgccgtgcgtctgccacgaatggaagcctttttgatcttccttaccacggtgatgatggtgagcctgatgatggccgcggatccccccctgcttgctacgccgcgtacgtacctgatgagccatatgccgtggctaccgtttttgctgatcctgctgcccgccaacatcatgaccatggtgatgtatgcctttcgtgcggaacgcaaacacatttccgaaagcgaaacccactttcggaacgcgatggaatattccgctatcggtatggcgttagtgggcaccgagggacaatggctgcaaaccaacaaagcgctctgccagtttctcgggtacagtcaggaagagctgcgcggactcacctttcagcaactgacctggccggaggatctcaataaagatctccaacaggttgaaaagctgataagcggtgaaataaacacctatagtatggaaaaacgctactacaaccgcaatggcgatgttgtctgggcgttgcttgccgtcagtctggtgcgccacacggatggcacgccgctctattttatcgctcagattgaagacattaacgagctaaaacgcaccgaacaggtcaatcagcaactgatggagcgcatcactctggctaacgaagcgggcgggattggcatctgggagtgggagttgaagccgaatatttttagctgggataagcggatgttcgagctgtatgaaattcctccacatatcaaaccgaactggcaggtgtggtacgagtgcgtgctgccggaagatcgccagcatgccgaaaaagtgattcgtgatagcttgcaaagtcgcagcccctttaaactggaatttcgcattaccgtaaaagacggtattcgccatatccgcgccctcgccaaccgggtactgaataaagaaggcgaagtcgaacgtctcctcggcatcaatatggatatgaccgaagtgaaacagcttaacgaggcattgtttcaggaaaaagagcgcctgcacattacgcttgattccatcggtgaagccgtggtctgtattgatatggcgatgaaaattacctttatgaatccagtggcggagaagatgagcggctggacgcaggaagaagcgttaggtgttccgctcctgacggtgttgcatattacttttggcgacaacggaccattaatggagaacatttacagtgccgacaccagtcgttccgcgatcgagcaagatgtggtgttgcactgtcggagcggcggcagttacgacgtgcattacagtattacgccgttaagtactctggacggcagcaatattggtagcgttctggtgattcaggacgttaccgaaagtcgcaaaatgctgcgccagctgagctacagcgcctcccatgatgcactgacgcatctcgccaaccgcgccagttttgagaaacaactgcgtatcctgctgcaaacggtaaacagtacacatcagcgacatgccctggtgtttatcgatcttgatcgctttaaagcggtgaatgacagcgccgggcatgcggcgggtgacgctttgctgcgcgaactggcgagcttaatgctgagtatgctgcgttccagcgacgtgctggcgcgactcggtggggatgaatttggtctgctgctaccagactgtaatgttgaaagcgcgcgttttatcgctacacgcattatcagtgccgtgaatgactatcactttatatgggaaggccgtgtgcatcgggtaggtgccagtgccgggattaccttgattgatgacaacaatcatcaggcggcagaagtgatgagccaggctgatatcgcctgttatgcctccaaaaatggtggccggggccgggtgacggtttacgaaccgcagcaagctgccgcacatagcgaacgggcggcgatgagccttgatgaacagtggcggatgattaaagagaatcagttgatgatgctcgcccacggtgtcgctagcccacggatcccggaagcgcgtaatttgtggctgattagtcttaagctctggagttgcgaaggcgagattattgatgaacaaacatttcgtcgtagcttcagcgatccggcgcttagccatgctcttgaccgccgggtattccacgaatttttccagcaggccgcaaaagcggttgccagtaaaggcataagcatctccctccccctttccgttgccggtttgagtagcgccacgctggtgaatgatctgcttgagcagctggaaaatagccctctaccaccacggttattacatctgattattccggctgaagcgattttagatcacgcagaaagcgtgcaaaaactgcggctggcgggatgtcggatagtgctcagccaggtgggccgcgatctgcaaatcttcaacagcctgaaagcgaatatggcagattacctgctacttgatggtgagttatgcgccaacgtgcagggtaatttgatggatgagatgctgattacgattattcaggggcacgctcagcgactcgggatgaaaaccatcgccgggccagtcgttttacccttagtgatggatacgctttctggcatcggcgtcgatctgatttatggtgaggtgattgccgatgcccaaccgctggatttgctggtgaatagtagttatttcgcgattaactgaggcgtgcttccccatcgcctgatgcgacgctaacgcgtcttatcatgcctacaaatcgctcattccccaggccggataaggcgctcgcaccgcatccggcgaccaacgtcatgcttcgtctggttgccagccttccgtataccagatatgcaacagcgcataagaacgccagggcttccagcgctcggcataacggcggatttgcgccggtgtcattcccggaaatcgctgtttaatcagataatcatccggcaggaaaacatctttcgcctgccagccacgcaaagcaaaataattcgccgtccagcgcccgatacccggaaaagtttgcagcgttttcatcgcctgctccacatcgcccggtattgtcattggtaaggtgccctccagcgccgcatttgccagatgaatcagcgcctctgcccgtttcaacggcatacctaacgcttttaatgcctgcgggtctgctgctgccagccgctgaggcgtcgggaagcagatatactccggaaaatcatccagccgttcgccataaagctgtgccactctggcggtcaattttgccgccatcgccacgctcaccagttggcctaaaatcgcccgcacgccctgctcaaaagcatcaacacagccgggtaaacgcaatccgggccgcgccgcgcctaacctgcccaacgcaccgttaacaatttgtgggttacattgcagatcaaacaggcggctcattttcgccagacactctgcggcaacaggttctaaacctgcacttaaatttatgtgcagagtatggcgggctatatccggaatagcagtcaccacgccgcgatattcgcccaccgccagactacgggcataataactgtccgcgaccgtttccacactgctcaccgcacgggcggcgagaaatcccaacatccagctccagtcatacggcggctgccagttcagggtatacatcgcatctccttattcatccgctttcagcataaacgttattcagacgctgcgctttgctttcatattccggttgtcgcgacggcaacatttcgctaaagtcacgccccttcttcaccggcatggggattatttcgtgtttattggttttgattacggtacagcaaactgtagtgtggcggtcatgcgtgacggtaaaccgcatttgctaaaaatggaaaacgacagcacgctgctgcctagtatgctttgcgcgccaacgcgtgaagcggtaagcgaatggctgtaccgccatcatgatgttccggcagacgacgatgaaacgcaggcgctgttacgtcgggcgattcgttataaccgcgaagaagatatcgatgttacggcgaaaagcgtgcagttcggtctttccagtctggcacagtacattgatgatccagaagaagtgtggtttgtgaaaagtccaaaaagcttcctcggtgccagcggcttaaaaccgcagcaggtagcgctgtttgaggatctggtctgcgcaatgatgttgcacattcgccagcaggcgcaggcacagctgccagaagcgattactcaggcggtgattggtcgtccgatcaacttccaggggctgggcggtgatgaagcaaacacccaggcgcaagggattctggaacgcgcggcgaagcgtgccggattcagggacgtggtattccagtacgagccggtcgcggctgggctggattacgaagccaccttgcaggaagaaaaacgggtgctggtggtggatatcggcggtggtacgactgactgtagtttgctgctgatggggccgcagtggcgtagccgtctcgatcgtgaagccagcctgctgggtcacagtggttgccgtattggcggtaacgatctggatatcgcgctggcgtttaaaaacctgatgccactgctgggtatgggtggcgaaaccgaaaaaggcatcgccctgccgatcctgccgtggtggaatgcggttgccatcaacgacgtacctgcgcagagtgatttctacagtagtgccaacggtcgtctgcttaacgatctggtacgcgatgcccgcgaaccggaaaaagtggccctgttacagaaagtctggcgtcagcgtttaagctatcgcctggtgcgtagcgcagaagagtgcaaaattgctcttagtagcgtagcggaaacccgcgccagtctgccgtttatcagcaatgaactggctacgctgattagccagcgagggctggaaagcgccctcagccagccactgacgcggattctggaacaggtgcaactggccctggataacgcccaggaaaaaccggacgttatctacctgaccggcggtagcgcccgttctccgctgattaaaaaagcgctggcagaacagttgccgggcattccgattgcaggcggcgatgactttggctccgtcaccgccgggctggcacgctgggcggaagtggtgtttcgttaattgaaaaatggctcagcagcggcttaaatctgcctgcgcctgagccagtttttctgctgcctgacgtaacggttccatcaacggcatggtccgtgctggagcatgaaggcggaatcgctgcaactctgtcgcgccgactgtcaacgcgctttccagccgatgtcgtttggcggtcattttcgccattaccgcttgtctgtctgctggcgttatcgcttcattcggcctgaacacaaaacggcgttcacagctcgctttccagtcgataaccgcctgggtcagatggtcgccaaaccctttcacttgcttaacgccacgacgggtaacatctgcggctgtttcaataccaaaagaccgtaacgccgctttacgcgcagggccaacgccgggaatagaggcaacatcaataaaaaatccctccagaaacttctgcttctgccgttcccttgcagtgtcatgaagtgctgccagagcgcgtttctcttcttccggtaacccgagaatttcgtccttcattttttcgagcatcgtccgtttggcgataaaaccttccaggccgcctacctgctggatctggcggactaaatggtcatagtccattttcgcacgattaaatgcctcacggcgttgctgaacttctgctttgtacgctttgcttgtcagactgccaataatccagatagccgccagcacaggaaccaaaataatataacgcggttctgcctgaaggccgcaaagcagcaggcttaatgcactcagtgcgatctcaagcagaatgatgtattcgcgccgtaacaggcctaaaggaagcggcctgccagtcggttggaaatgatcgggtaatggcagttgcaatgctggcggtgctacactcgccatcaccatcgcccagactttcgccagcacaaaattcccgccggtggtaatgacctcttcgccgagatcaataaaatagataacaccttgattatccagcgcacaccacgggcagtcagtcaaatgagcggggtaaacatgcattgcactaacgatacatttctttaactgttggcgtagagagtccagtgccgctacccacgctttagccgtcggacgcccggttgccacgccactttccgtgaatgcctgctgaaacatggcttcaacatcactcggtaacatgcttagcggaatagatcgtggcggcggttttaaaccacgtcgctgattatcactcgcgtaggcataacggaaatgggtaatatccgtctccagcgcattacccgcatcagagataagcggcacaccagaataaggatgccgcccaccaaacaagacgtgaaaaattagcaacgcaaggccaaaattatcgtgattttctgtgcgttcaaaaccgacaaaacttggcaaggtttgtagctctggcggcgtaaaatggctcacgccgacttcgcataaatgcagtgtgccattggcgttaatttgaaaggagtcgctatcaatcagtaccactttgctgtcgcgacctaccataaaactgttctggtttacgtcacccacgacgtgcccgtgctcgtgaaccgtagcaaaagaactagcaatattgcgcgcaacatagagtagaaaatcccacgcacaatgagggtaactctggcgacgatgtgccgggctatagatcatatgaatcggttctttaccagaaacttttggcatcataaaaccgataacttttccgcctcgtccaccgtgaagcgttgcctgcggccaggcgacataattcaacaactgcgcgtcagctgtcgcagccataaaggcaagtttgtcctgttttaaggcgggtggcggcgtgtgataaatcttggcgacgctatcgacaaactcctcgatatcataaaccgcgccttcaccacctttgcccagttcacggccaagagtggtcaattcacctgtgcttgtaaatacttttatatttgttttcataatatttcgcgggtagttatattatatttcaatgaataataacaactaaccattaaaattatttctatatggggaaaacccactcaagaataaaaatgataatgcaattttatcaggatacaattcaatttcggcctgataatgattaacttccacaggtttttgctaactttgactacaaagggattctggagaaaaaatgaaaaagatattacttatgttgagtctgctattttttactaccgcgggctttagtgaagttagcgatacgttagtgacgggaggttatgataaacaagcgatgtctgacgcgattaaacatgcgcggaaagaaaccgataaattcatcgaggttatgaataaaaaagatgccgatactttcgcagtcaaagccccgataaccgatcacggaagaaccgagcatttctggcttacggatgtcacttattctaacggcatgtttattggcgtaatcagcaatgaccctggtattgttacaaacgtagaatatggccaggagtggaaaatcaagaaagaagatattagtgactggatgtatacgcgcggggataaaatttacggcggttataccattgatcctttattggtcacctatccaaaagaagaagccgacgagctaagagcaaaattagttcgctaatcagccgttatatttattgtttaaactggcggttgaattgttgtcttcaaccgccatgagaaactcactctgcccacagcgccagtgccaacgttttatcatcatccgtacgctcgtttaccgccgggctggacaaaaactgctttaacaattcaggtaataaatcgagttgttcctgcgttgctgccgccagtccattgaaaaacggggtaaagaaaggcacatgaggagaattatccagcatatttaacgccagtcgctggataccatccgtaaatgctgcaactttgtgcgcacgcccagtgctggtgagagtttccagtctggaaacggcatcttcgtcggtaatgaagtgcgtcatgttggcatattcacccgccatcggcgtgagaggcaattgcagaccgtgacccaaatctaccaccacgccgccatcgccaatctgcataatcaaggtgccgtcagggctactaatcagtcccagaaatgtgcaggcaaaatcgcgaaccgctaattctttggcttccgcctcggcaaaaagtcgttgacgaatggtcagtaccatatttgtggcgaggacatcattaagccccaattccccgccctgcactttttggctcatataagccatcgcttcattgacggcgagcatcgcgccttcgccaccctggctgacactgcctgcgccatcagcgacaaatacgctcaataatggctgctggtcatttaaccaggcaatctgcatctggcaggcatcctgacaaggcaagtccgcgctgatgtggctcgttccaacggtacttgcatagaccagacgccagctcacacactcgtccagccttttggcgcttccagcacaacttccgttcccggcgtggagcgggaaacgctacgcaggctactggataaccagctaaacagttcacggaattgtaatccttgcagaggcaaaggctgacgaacgctaatttgtgccagcgtcttcatatccgccccctgaacaccgatggaaaagaaagcaaaccttttatcttcttccccccgaaacactttgttggctgcagcctgccactcatcggttggtgcaccatcggtaatcaggaaaatccacgggcgataatagctaataccatttgcacgatactcacgtttccgctcctctaccatatccagggctttggtaatggccgcacccattggtgtatcgccctgggcaaacaggatgggcggaaaaaaattagcggcgctggtaaagggttgttccacatgcaccgggccgaacgtcacaatgccgagttccactctttttaaagccagcggatcagcaagcagttcatcacgaaaggtaaccaatccggcgttaagttcattaataggtctaccgttcatagaaccagaaacatccagcagcaaaatgcaggggcaacgtggttccgggttactggcaaaatcgctggtggcaaacgtgatttgttcgctcataagaaatcctttcttagagaattatcgaggtccggtatcataccgactgcaataatgaaataagagcaaacgaagaaactttcagaattaggcccggcggcgcagaaaattttgctattcgcctcgcaagaacggagagccgtcgattgacactaagggcggagtgacataatttcaggagtgagggttagggagaggtttccccctccccctggtgttcttagtaagcctggaagctaatcactaagagtatcaccagtatgatgacgtgcttcatcataaccctttccttattaaaagccctcttctccgggagaggctttcccgtttcagcgtcccgctgaaatcatcggcttacctcctttcgccctgaatgcagtctatcgctaacgcgtgaataaaatagtttcctctgtgattattgcgtaacgactcgcaaagaatatttgctggcaggatcgcagactacaaagcctgcggattgacaatcttatcgtgaagacatactttcaggagtgagggtagagcggggtttcccccgccctggtagtcttagtaagcggggaagcttatgactaagagcaccacgatgatgagtagcttcatcatgaccctttccttatttatggccccttcctcgggaggggctttcccgtttcagcgtcccgctgaaatcgtcggcttacctcctttcgccatgcaagcagtctatcgctaacgcgtagataaaatagtttcctgtgttattactggatgcgtgctcgcaaatgtgcccgtcattcagacgattccagacagtgtttcataattcctccatttttctcccttattggctggctacactagtatcattccgcgaaacgtttcaggaagagaaactcttaacgatgaaaggtagttataaatcccgttgggtaatcgtaatcgtggtggttatcgccgccatcgccgcattctggttctggcaaggccgcaatgactcccggagtgcagccccaggggcgacgaaacaagcgcagcaaagcccagcgggtggtcgacgtggtatgcgttccggcccattagccccggttcaggcggcgaccgccgtagaacaggcagttccgcgttacctcaccgggcttggcaccattaccgccgctaataccgttacggtgcgcagccgcgtggacggccaactgatagcgttacatttccaggaaggccagcaggtcaaagcaggcgatttactggcagaaattgaccccagccagttcaaagttgcattagcacaagcccagggccaactggcaaaagataaagccacgcttgccaacgcccgccgtgacctggcgcgttatcaacaactggcaaaaaccaatctcgtttcccgccaggagctggatgcccaacaggcgctggtcagtgaaaccgaaggcaccattaaggctgatgaagcaagcgttgccagcgcgcagctgcaactcgactggagccggattaccgcaccagtcgatggtcgcgttggtctcaagcaggttgatgttggtaaccaaatctccagtggtgataccaccgggatcgtggtgatcacccagacgcatcctatcgatttagtctttaccctgccggaaagcgatatcgctaccgtagtgcaggcgcagaaagccggaaaaccgctggtggtagaagcctgggatcgcaccaacagcaagaaattaagtgaaggcacgctgttaagtctagataaccaaatcgatgccactaccggtacgattaaagtgaaagcacgctttaataatcaggatgatgcgctgtttcccaatcagtttgttaacgcgcgcatgttagtcgacaccgaacaaaacgccgtagtgatcccaacagccgccctgcaaatgggcaatgaaggccattttgtctgggtgctgaatagcgaaaacaaggtcagcaaacatctggtgacgccgggcattcaggacagtcagaaagtggtgatccgtgcaggtatttctgcgggcgatcgcgtggtgacagacggcattgatcgcctgaccgaaggggcgaaagtggaagtggtggaagcccagagcgccactactccggaagagaaagccaccagccgcgaatacgcgaaaaaaggagcacgctcctgatgcaggtgttacccccgagcagcacaggcggcccgagccgcctgtttattatgcgtcctgtggccaccacgctgctgatggtggcgatcttactcgccgggattatcggttatcgcgccctgcccgttagcgcgctgccggaagtggactatccgaccattcaggtggtcacgctctacccaggtgccagcccggatgtcatgacctctgccgttaccgcgccgctagaacgccagttcgggcagatgtctggcctgaaacagatgagcagccaaagttccggcggtgcgagtgttatcactttgcagttccagctaacattaccgctcgatgtcgccgagcaggaagtgcaggccgcgattaacgctgcgaccaacttgttgccgagcgatctgcctaacccgccggtttacagcaaagtgaacccggcagatccgccgatcatgacgctcgccgtcaccagtaccgccatgccgatgacgcaagtggaagatatggtggaaacccgcgtcgcgcagaaaatcagccagatttccggcgtcggcctggtgacgctttccggcggtcagcgtccggctgttcgcgtcaaacttaacgctcaggcgattgccgccctcggcctgaccagcgaaaccgtgcgcaccgccattaccggcgctaacgttaacagcgcaaaaggtagcctcgacggcccttcccgtgcggtcacgctttccgcgaacgaccagatgcaatccgccgaagagtatcgccagctaatcatcgcctaccagaacggcgcgccaattcgtctgggcgatgtcgcaactgtagagcaaggtgcagaaaacagctggctcggcgcgtgggcgaacaaagaacaggccattgtgatgaatgttcagcgccagcccggtgctaacattatctccaccgccgacagcattcggcagatgctgccacagctcactgagagtctgccgaaaagcgtgaaggtgacagtgctttccgatcgcaccaccaatatccgcgcatccgtcgatgatactcagtttgaattgatgatggctatcgcgctggtagtcatgattatctacctgtttttgcgcaatattccggcgaccatcattcccggtgttgctgtaccgctgagcttaatcggcactttcgcggttatggtgtttctcgattttagtatcaataacctgacactgatggcgttaactatcgccaccggattcgtggtcgatgacgccatcgtggtgatcgaaaacatttcccgctatatcgaaaaaggcgaaaaaccgttggcggcggcgctcaagggcgcaggtgaaatcggctttaccattatcagcctgaccttcagtctgattgcggtgttgatcccactgctgtttatgggcgatatcgtcgggcgactgttccgcgaatttgctattaccctggcggtagcgattttgatcagtgcggtggtgagcctgaccctgacaccgatgatgtgcgcgcggatgctcagccaggagagcttgcgtaaacagaaccgcttctcccgtgccagcgaaaaaatgttcgacaggataatcgccgcctatggtcgtggactggcgaaagtgctgaatcatccgtggctgaccttaagcgtggcactcagcacgctgctgcttagcgtgctgctgtgggtgttcattccgaaaggtttcttcccggtacaggacaatggcattattcagggcactttgcaggcaccgcaatccagctcctttgccaatatggcccagcgacaacgccaggtcgcggacgtgattttgcaggatccggcagtgcaaagcctgaccagttttgttggcgttgatggcactaacccgagcctgaacagtgcacgtttacaaatcaacctcaaaccgttggatgaacgtgatgatcgggtgcaaaaagtcatcgcccgtctgcaaacggcggtagataaagtgccgggcgtcgatctcttcctgcaaccaacgcaggatctgactattgatactcaggtcagccgcacccagtaccagtttaccttgcaggccacgagtctggatgcgctcagtacctgggtgccacagttgatggaaaaactccagcaactgccacagctttctgatgtctccagcgactggcaggacaaagggctggtggcgtatgtcaatgttgatcgcgacagcgccagccgtctggggatcagcatggcggatgtcgataacgccctgtacaacgcgtttggtcagcggctgatttccactatttatactcaggccaaccagtatcgcgtggtgctggagcacaacaccgaaaataccccaggcctcgcggcgctggataccattcgcctgaccagcagcgacggcggcgtggtgccgctaagcagtattgccaaaattgagcagcgttttgcgccgctctccatcaaccatctggatcagttcccggtaacgaccatctcctttaacgtgccggataactatagcctgggcgatgcggtgcaggcgattatggacaccgaaaagacgctgaatctgccggtggatatcaccacgcagttccagggcagcaccctcgccttccagagcgcgctgggcagcactgtctggctgattgtcgcggcggtggtggcgatgtatatcgtgctcggcattctgtacgagagctttattcacccgatcaccattctcagcacgctacccaccgcaggggttggcgcactgctggcgttgctgattgctggtagcgaactggatgtgattgcgattatcggcattattttgctgatcggtatcgtgaagaagaacgccatcatgatgatcgacttcgcgctggctgctgagcgcgagcaaggcatgagcccgcgcgaggcaatctaccaggcttgtctgttgcgttttcgtccgatcctgatgaccactctggcggctctgcttggcgcgctgccgctgatgttgagtaccggggtcggcgcggaactgcgtcgtccgttaggtatcggcatggtcggcggtctgattgtcagccaggtgctgacgctgtttaccacgccggtgatttatttgctgttcgaccgcctggcattgtggaccaaaagccgctttgcccgtcatgaagaggaggcgtaagtgaagttttttgccctcttcatttaccgcccggtggcgacgattttactgagcgttgccattaccctgtgcggcatactgggcttccgtatgctgccggtcgccccgctgccgcaggtcgattttccggtgattatcgtcagcgccagcctgcccggtgcgagtccagaaacaatggcgtcttccgttgccacgccgctggagcgcagtcttgggcgcattgccggagtcagtgaaatgacctccagcagtagcctcggcagcacgcgtattattttgcagtttgattttgaccgggatatcaacggcgcagcgcgtgatgtgcaggcggcgatcaacgctgcacaaagtttgctgcccagtgggatgcccagccgcccgacctatcgcaaagcgaacccgagcgatgcgccaattatgatcctcacgctgacgtccgatacttatagccagggtgaactgtacgatttcgccagcacgcagctggctccgacgattagccaaatcgacggtgttggtgatgtcgatgtcggaggcagcagtctgcccgccgtacgcgtcgggctgaatccgcaggcgctgtttaatcagggcgtgagcctggacgacgtacgcaccgccgtcagcaatgccaacgtgcgtaaaccgcagggcgcgctggaagatggcactcaccgctggcagatccagaccaatgatgagctaaaaaccgccgctgaatatcagccgttgattattcactacaacaacggcggcgcggttcgtctgggcgatgtggcgacggtgaccgacagtgtgcaggatgtgcgcaacgccgggatgaccaacgccaaaccggctattttactgatgatccgcaaactgccggaagccaatattatccagacggttgacagcatccgggcaaaattaccggagttgcaggaaaccattccggcggcgattgatctgcaaattgcccaggatcgctcccccaccattcgcgccagcctggaagaagtcgagcaaacgctgattatcagcgtggcgctggtgattctggtggtgtttttattcctgcgcagcggtcgcgccactattattcccgccgttagcgtgccggttagcctgattggtacgtttgcggcgatgtacctgtgcggattcagtctcaataaccttagcttaatggcgctcaccatcgctactggtttcgtggtggatgacgccatcgtggtgctggaaaacattgcacgtcatctggaagcgggaatgaaaccgttgcaagccgcactgcaaggtactcgcgaagtcggttttacggtgctgagcatgagtctgagtctggtggcggtgttcctgccgctgctgttgatgggcggattgccgggccgactgttacgcgaatttgccgtgacgctttctgtcgccattggtataagcttgctggtttctctgacattaacgccaatgatgtgtggctggatgctgaaagccagcaagccgcgcgagcaaaagcgactgcgtggttttggtcgcatgttggtagccctgcaacaaggctacggcaagagtctaaaatgggtgctcaatcatacccgtctggtgggcgtggtgctgcttggcaccattgcgctgaatatctggctgtatatcagcatcccgaaaaccttcttcccggagcaggacactggcgtgttgatgggcgggattcaggcggatcagagtattagctttcaggcgatgcgcggtaagttgcaggatttcatgaaaattatccgtgacgatccggcagtggataatgtcaccggctttacaggcggtagccgagtgaacagcgggatgatgtttatcaccctcaagccacgcgacgaacgcagcgaaacggcgcagcaaattatcgaccgtctgcgcgtaaaactggcgaaagaaccgggggcgaatctgttcctgatggcggtacaggatattcgcgttggtgggcgtcagagcaacgccagctaccagtacacgttgttatccgacgacctggcggcactgcgagaatgggagccgaaaatccgcaaaaaactggcgacgttgccggaactggcggacgtgaactccgatcagcaggataacggcgcggagatgaatctggtttacgaccgcgacaccatggcacggctgggaatcgacgtacaagccgccaacagtctgttaaataacgccttcggtcagcggcaaatcagcaccatttaccagccgatgaaccagtataaagtggtgatggaagtggatccgcgctatacccaggacatcagtgcgctggaaaaaatgttcgttatcaataacgaaggcaaagcgatcccgctgagctatttcgctaaatggcaaccggcgaatgccccactaagcgtgaatcatcagggattaagcgcggccagcaccattagctttaacctgccgaccggaaaaagcctcagcgacgccagtgcggcgatcgatcgcgcaatgacccagcttggtgtgcctagcacggtgcgcggcagttttgccggcacggcgcaggtgttccaggagacgatgaacagccaggtgatcctgattatcgccgccatcgccacggtgtatatcgtgctgggtatcctttacgagagttacgtacatccgctgacgattctctccaccctgcccagcgcgggcgttggagcgctgttggcgctggagctgttcaatgccccgttcagcctaatcgccctgatagggatcatgctattaatcggcatcgtgaagaaaaacgccattatgatggtcgattttgcgcttgaagcccaacggcacggtaacctgacgccgcaggaagctattttccaggcctgtctgctgcgttttcgcccgattatgatgactaccctggcggcgctgtttggtgcgctgccgctggtattgagcggcggcgacggcagcgagctgcggcaacccctggggatcaccattgtcggcggactggtaatgagccagctccttacgctgtataccacgccggtggtgtatctctttttcgaccgtctgcggctgcgttttagccgtaaacctaaacaaacggtaaccgagtaaatgacagatcttcccgacagcacccgttggcaattgtggattgtggctttcggcttctttatgcagagcctggacaccaccatcgtaaacaccgcccttcccagtatggcgcaaagcctcggggaaagtccgttgcatatgcacatggtcattgtctcttatgtgctgaccgtggcggtgatgctgcccgccagcggctggctggcggacaaagtcggcgtgcgcaatattttctttaccgccatcgtgctgtttactctcggtagtctgttttgcgcgctttccggcacgctgaacgaactgttgctggcacgcgcgttacagggcgttggcggcgcgatgatggtgccggtcggcagattgacggtgatgaaaatcgtaccgcgcgagcaatatatggcggcgatgacctttgtcacgttacccggtcaggtcggtccgctgctcggtccggcgctcggcggtctgctggtggagtacgcaagctggcactggatctttttgatcaacattccggtggggattatcggtgcgatcgccacattgctgttaatgccgaactacaccatgcagacgcggcgctttgatctctccggatttttattgctggcggttggcatggcggtattaaccctggcgctggacggcagtaaaggtacaggtttaagcccgctgacgattgcaggcctggtcgcagttggcgtggtggcactggtgctttatctgctgcacgccagaaataacaaccgtgccctgttcagtctgaaactgttccgtactcgtacctttagcctgggcctggcggggagctttgccggacgtattggcagtggcatgttgccctttatgacaccggttttcctgcaaattggcctcggtttcagcccgtttcatgccggactgatgatgatcccgatggtgcttggcagcatgggaatgaagcgaattgtggtacaggtggtgaatcgctttggttatcgtcgggtactggtagcgaccacgctgggtctgagcctggtcaccctgttgtttatgactaccgccctgctgggctggtactacgttttgccgttcgtcctgtttttacaagggatggtcaacagcacgcgtttctcctccatgaacaccctgacgctgaaagatctcccggacaatctggcgagcagcggcaacagcctgctgagcatgattatgcaattgagcatgagtatcggcgtcactatcgccgggctgttgctgggactttttggtagtcagcatgtcagcgtcgacagcggcaccacacaaaccgtctttatgtacacctggcttagcatggcgttgatcatcgcccttccggcgttcatctttgccagagtgccgaacgatacgcatcaaaatgtagctattagccggcgaaaaaggagcgcgcaatgaagttctggcgacccggtattaccggcaaactgtttctggcgattttcgccacctgcattgtcttgctgatcagtatgcactgggcggtgcgtatcagttttgagcgtggctttattgattacatcaagcatggtaatgaacagcgattacaactgttaagtgatgcgcttggcgagcagtatgcgcagcatggcaactggcgcttcctgcgcaacaatgatcgctttgtctttcagatcctgcgtagttttgaacacgataatagcgaagataaacccggcccgggtatgccaccgcacggctggcgtacccagttctgggtggttgatcaaaacaacaaagtgctggttggtccgcgagcgccgattccacctgacggtacacggcgacccattctggtcaacggtgcggaagttggcgcggtgatcgcctcccccgttgagcggttaacgcgcaatactgatatcaatttcgataaacaacagcggcaaaccagctggttgattgtcgccctggcaacgttactcgcggcacttgccacttttctgctggcgcgcggtttactggcaccggtaaaacgacttgtcgatggcacgcacaaactggcggcgggcgatttcactacccgcgtaacgcccaccagtgaagatgaactgggcaaactggcgcaagacttcaaccagcttgccagcacactggagaaaaaccagcaaatgcggcgcgattttatggccgatatttctcacgaactgcgtacgccattagcggtgctgcgcggtgaactggaagccattcaggatggcgtgcgtaaattcacgccggagacggtggcgtctttacaggcggaggtcggtacactgaccaaactggttgacgatctccatcagttgagcatgtctgatgaaggcgctctcgcctatcaaaaagcaccggtagatttgatcccactgctggaagtggcgggcggcgcatttcgcgaacgattcgccagtcgtggcctgaaactgcaattttccctgccagacagtattaccgtatttggcgatcgcgaccgtttaatgcagttattcaataacttactggaaaacagcctgcgctacactgacagcggcggcagcctgcaaatctctgccgggcagcgcgacaaaacggtgcgcctgacctttgccgacagtgcgccaggtgtcagtgacgatcagctacaaaaattgtttgaacgtttttatcgcaccgaaggttcccgcaaccgtgccagcggcggttccgggctggggctggcgatttgcctgaacattgttgaagcacataatggtcgcattattgctgcccatagcccttttggcggggtaagcattacagtagagttaccgctggaacgggatttacagagagaagtatgaccgagttaccaatcgacgaaaacacaccgcgtattttgatcgtggaagatgaaccgaagctggggcagttgctcattgattatctgcgtgctgcgagctatgcgccgacgcttatcagccacggcgatcaggtactgccgtatgtgcgccagacaccaccggatctgatcctgttagatctgatgctccctggcaccgatggcctgacgctgtgccgggaaattcgtcgtttttctgacattccgatcgtgatggtgacggcaaaaatcgaagagatcgatcgcctgctggggctggagattggcgcagatgattatatctgtaagccgtacagcccacgggaagtggtagcgcgcgtcaaaaccattttgcgccgttgcaaaccgcagcgcgagttgcagcaacaggatgctgaaagcccgttgattatcgacgaaggtcgttttcaggctagttggcgcggtaaaatgcttgacctgacgcctgcggaatttcgtctgctgaaaacgctctctcacgaaccaggaaaagtgttctcccgcgagcaattgctcaatcatctttatgacgactaccgcgtagtaaccgaccgcaccatcgacagccacattaaaaacctgcgccgcaagctggaatctctcgacgccgaacagagttttatccgcgccgtttatggcgtcggttaccgctgggaagccgacgcctgccgcatcgtttaattttagcgacattattttgttagccggagatggcgttcagaccagatccggcaacattatcccacgcatggtcagcaaactgacattatctctccgccctggcaggcatcagaaaatcgctcatactttaatcggtaaacagcacctttagaatcctgtcgtttgttttcgatttcaaaatataatgaaattatttgtttttaaatatcgagataacgatcacaaaaacgacaatatgaaaattattcgaggagtgaaaggcaaaaaaacggcctcccgatagggaagccgtagcaaagtgcgcgtgtttttatgccggatgcggtgtaaacatacgtggcagtgctatgtaggcatgataagacgcttcagcgtcgcatcaggcataggttgccggatgcagcgtaaacgccttatccgtcctacggggtggtgttgttcgtataaggcgtatcaggcgatagtaattttgctatcgagataaacgtcctgcacggcgttaatcagtttcacgccgtcagccatgcttttcttgaacgctttacgtccaagaatcagccccattccgcctgcgcgtttgttgataaccgcagtacgcactgcatcgctgaggtcagtttcaccgcccgcagcaccgccggagtttatcaacccagcccgacccatatagcagttagctaactgataacgcaccagatcaatcgggttttcgctggtcaatttgctgtaaacacgatcgtcggtgtaaccgtaattaattgctttatagccgccgttattttccgccattttttgtttgacgatatctgcaccgatggttgccgccagatggtttgcctgaccggtcaggtcggcggaaacatggtaatcaacgccatctttcttaaaggcggagttacgcaaataggcccacagcactgtcaccatacccagctcgtgcgcacgttcaaaagccgcagaaatttcttcaatctggcgacgactctcttcgctgccaaaatagatagtcgcaccaaccgcaaccgcgcccatgttgaacgcctgctccacgctggcatacagcgtttgatcgtaggtattcgggtaacttagcgtctcgttgtgattaagtttgacgaggaatggaatgcgatgcgcataacgccggcttacgctcgccagcacgccgtaagtactcgccacacagttacagcccgcttcgatcgccagttcaacaatgtttttcgggtcaaagtagagcgggttagcagcaaaactagctccggcagagtgctcaacgccctggtcaaccggcagaatagaaagatatcctgtgccagccagacgcccggtgttgtacaacgtctgcatattacgtaacaccgctggcgggcgattattgtcaatcattacgcggtctacgtagtcatgtccggggagataaagctggtcagaaggaattgtcatacaacggtgctgtaaaaggttgtcggcgtctttgccaagcaactgcgcaatatctgtcattactatgctcccgtaaattccgattggatatcggctatggattgtcctggcccgccttttgcgggcaatcataatcctggtcgttacgggcgagtttttccatcttttggatgttttttcagcgttttctgttggctcgattcatcagaaaaaatgttagcgcggtcaagttttcaccgcaaaggtatttaaaaggtattattaagtggtattgtcatcgcgtaccttacattacctgtcatgaaggaattaaaagatgaaaacaacagcaaagctgagcttcatgatgtttgttgaatggtttatctggggcgcgtggtttgtgccattgtggttgtggttaagtaaaagcggttttagtgccggagaaattggctggagctatgcctgtaccgccattgcggcgatcctgagcccaattctggttggctccatcactgaccgctttttcagcgcgcaaaaagtgctggcggtattgatgttcgcaggcgcgctgctgatgtatttcgctgcgcaacagaccacttttgccgggttcttcccgttactgctggcctacagcctaacctatatgccgaccattgcgctgactaacagcatcgcttttgccaacgtgccggatgttgagcgtgatttcccgcgcattcgtgtgatgggcactatcggctggattgcctccggtctggcatgtggtttcttgccgcaaatactggggtatgccgatatcagtccgactaacatcccgctgctgattaccgccggaagttctgctctgctcggtgtgtttgcgtttttcctgcccgacacgccaccaaaaagcaccggcaaaatggatattaaagtcatgctcggcctggatgcgctgatcctgctgcgcgataaaaacttcctcgtctttttcttctgtagtttcctgtttgcgatgccactagcgttctattacatctttgccaacggttatctgaccgaagttggcatgaaaaacgccaccggctggatgacgctcggccagttctctgaaatcttctttatgctggcattgccgtttttcactaaacgctttggtatcaaaaaggtattattgcttggtctggtcaccgctgcgatccgctatggcttctttatttacggtagtgcggatgaatatttcacctacgcgttactgttcctcggtattttgcttcacggcgtaagttacgatttttactacgttaccgcttacatctatgtcgataaaaaagcccccgtgcatatgcgtaccgctgcgcaggggctgatcacgctctgctgccagggcttcggcagtttgctcggctatcgtcttggcggtgtgatgatggaaaagatgttcgcttatcaggaaccggtaaacggactgactttcaactggtccgggatgtggactttcggcgcggtgatgattgccattatcgccgtgctgttcatgatttttttccgcgaatccgacaacgaaattacggctatcaaggtcgatgatcgcgatattgcgttgacacaaggggaagttaaatgaaaacagaacgtattctcggtgctctttatgggcaggcgttaggggatgcgatggggatgccctccgagctttggccacgcagccgcgttaaagcacactttggctggattgaccgttttcttcctggaccaaaggagaataacgcggcctgttattttaaccgcgccgaattcaccgacgataccagcatggcgctgtgtctggcggatgcgttactggaacgtgaaggcaagatcgatccggatctgattgggcgtaatattctcgactgggcgctgcgtttcgacgcctttaacaaaaacgtactaggtccgaccagcaagattgcgcttaacgccattcgcgacggtaaacccgttgctgaactggaaaacaacggcgtgaccaacggcgcagcgatgcgcgtcagcccattaggttgtttgcttccggcgcgtgatgttgattcctttattgatgatgtagcgctggcgtccagcccgacccataaatccgatctggcggttgcaggcgcggtagtcatcgcatgggcgatttctcgtgccattgacggagaaagctggagtgcgattgttgattccctgcctagtattgcgcgacatgcacagcaaaaacgcatcactacgttcagcgccagtctggcggcgcggctggagattgcgctgaaaattgtgcgcaatgccgacggcaccgaatccgccagcgaacagctttaccaggtcgttggcgcaggtaccagcactattgagtccgttccgtgcgccattgcgctggttgaactggcacaaaccgacccgaatcgctgcgccgtcctgtgcgctaaccttggcggcgacacagacaccatcggtgctatggcgacggcaatttgcggcgcgttgcatggcgttaacgctatcgatcctgcgttaaaggcggaactggatgcggtaaatcagcttgatttcaaccgctatgccacagcgctggcgaaatatcgtcaacaacgggaggcggtatgagcggcgctcgattacacacgctgctgcctgaattaaccacgcgtcagagcgtgatggtcgtcggcgcggcggtcattgacgtgatcgccgacgcttatgccctcccctggcgtgggtgcgatatcgaactgaaacagcagagcgttaacgttggcggctgcgcactgaatattgccgtggcgttaaagcgcctcggcatcgaagcgggtaatgccttgccgctcggtcagggcgtgtgggcggagatgattcgcaaccggatggcaaaagagggcttaatcagcctgatcgataacgccgaaggtgataacggctggtgtctggcgctggttgagccggatggcgaacgcacttttatgagtttcagcggtgttgaaaatcagtggaatcgccagtggctggcgcgattaaccgttgcgcctggcagcctgctctatttttccggttatcaactggccagcccctgcggcgaattgttagtggaatggctggaagagctgcaagacgtgacgccgtttatcgattttggcccacgtattggcgatatcccggatgcattactggcgcggatcatggcctgtcgacctttagtgagcctcaatcgtcaagaggctgagattgccgccgaacgttttgctttatccgcagagataacaacacttggcaagcaatggcaggagaaatttgccgcgccgttgatcgttcgtctcgataaagaaggcgcatggtatttcagcaacgacgcttctggctgcattccggcatttccaacgcaagttgtcgacaccattggggcgggcgacagtcatgccggtggcgtacttgccgggctggcctctggtctgccactggcggatgccgtattactgggcaatgcagtggcgagctgggttgtcgggcatcggggcggtgattgtgcgccaacgcgcgaggaactactcctcgcacacaaaaacgtataattactcctcgcacacaaaaacgtatagatcgctgcgacagtggctaatgctgtactcaataggccgttgctgttggtcaagcgccacttgcttgatcaccagcaccggtattttgctatctaactgaatatgactctgaaactcggcatccggcatccgggcgctaacgcgggaacgcgtacgttgtgggtaaatgtgctggctgcggaaatagtcataaagactaatcccgatggcatcaacatcatgaattaaatgcgccggaacccagctttcctcaatgcttaccgcttcttcatcgacatagcgaatacgcttaagcaaaaagacatcacttcctgcttcgaccgccagctgctgcgcgacttcttcgggacatttcacgacacgcttgttaacccatagcgtatcgggctttttcccgcgcaataccacctgctgagaaaaacctcgcgcttctttcaagctgtattcgaagatgttgttgatctgcgtgccgtaaccgcggctacgcgtcaccacaccctcttcttccagcgcctgcatcgccttgcgcaccgtaatgcggctaacgccggttaactgacttaaatcacgttcaccgggcaaaatattgccatgctccagcaccccgctgcgcacggcattttttaccgtttcggcaaacttaatataaagcggcgtgttatccgccgctaaaatacgctcgttcagttgggcaatcagctgggtatgcgcttgttccatttgtctttttcctgccggggagtctggtgggagtatatcactgcttcttatttaaggcgtttctttaatcccatcaacgaatgcctgcaactcctccaccgtgccattaaatacattaaaatccaccggaccattgatgccatctacctgtccacggtcggaatgctgccagaagcgccaggccattccgtcattgtccggacgacgttgatagtagtgagccacccaccacggatattcattgaaatagcccgccagattggtgtgataaaaaacggctccactgtaaataatcggctttttccccgtacttttttcgaccatttttagccactgacttacccgcttgcgtaattcttttgcgcttaattttccccgttcttctacgtccagcacggcagggaaatcgccttgactgaaatccaccgtttgcagaaataatctcgcctgaacactagcggatacgctcggggagaaataatgatacgccccacgcagcaggccattttcgcggcttagttgccagttacggctaaaataggggtccaccagcttttcgccttccgtcgccttaataaaagcaaactgtaagcggataccattgtcgcgcatttttgccacccgctgccagtcgatccgctcctgccagcggctaacatctattccgtgaatggtgtaactggcaggaatgcgaatagcgaaagatttaaccgggcgataaccgtagaagtggatgtagtctgtaatctgaactgctgtgctatagaaaaaattcaccgtctgacgcggataaattgcaacgatggaaattagcccaagagcgcataatagagaggtgagtttttttcgactggtaattcttagctgcattggtttcatccctgaatgtcagtgccaaaggctgacaataaccaaagcagctatagtacggcgctcaccaccaggcgtggaagtggtgaaccggaccaataccgtgaccaacttccagcgtgtcggcctgggctaacgcgctactaagccagctttttgcctcctgtacggtgtcagcccagtttgtatggcgcgggcgtagtgcagccaacgccgcagagagtgtacaaccagtgccgtgggtgtttttggtcataatgcgcggtgcggtaaaccgttgttcaccctcgcgggtaaacagccagtccgggctttgctcatcatccagatgaccacctttcattagcactgcgccacagcccatcgccaacaggcttcgcccttgttccagcatttcctgttcggtgcgcgcgtgtggcgcgtcgagcaaggcggcagcttcgggcaagtttggcgttattaaactaacctgtggcaataatcgactgcgcagcgtagcaaccgcgctaggactaagcagcgggtcgccgctttttgccagcataacggtgtcgagtaccacgttttggatctgataacgttgcaaccgttctgccaccgcttcaacaatatcggtttccgccagcataccgattttagtggtatcgattcgcacatcgctgaacacgctatcgagctgggcggcgacaaaatcaggctcaatgcgatacacgctctgtacgccacgggtattttgcgccaccagtgcagtaataacactgcaaccataagcgccaagtgcgctgaaggttttaagatcggcctgaatccccgcaccaccactcggatcagtaccggcaatcgtcagagcgttaattcgtttcatgcctgcacctcctgcgtcaattgccagagcgcatcaaggaaatgtggaacaaaactgcctggcccctcgcttctggcgactgcgcgttctccggcttgtttcatccagtgacaggcagatgcgacattttccagcgtatcgcctggtaacgcacagcaggcagcgacaaccgcgcttaatgcacagccagttcctaccactttggtcattaacggatcaccaccgtgaataccaatgatacgatgtccatcggtaacataatccatctcgccagtgaccacgacgattgcgccagtttcccgtgccagtgtttgtgcagcgggtatcgcgttagctgcggcgtcagtggtatccactccccgtccgccattagcaatgccagctaatgccatgatttcgctagcattaccacgtatcgctgccggtttaaaagataaaagttcatgacaaaaatggcggcgataatcgagcgcacccaccgctactggatcaagcgtccagggtgtttgagagctttttgcttgctcaacggcagcacgcatcgcctgagcgcgtggctgcgtcagtgtgccaacgttaatcaacaaggcactggcgatagccgcaaactgactggcctcttcggtttcgataaccatcgctgggcttgcaccgagcgccagcaaggtattggcggtaaaggtttgcaccacatcattggtcatgcagtgcacaagaggggaatgttggtgaaaaaggtgtaacgcgtgcgcagattgcgcactacccagcaggtcgacttgcatagtttgctcctgccataacgtgaagaagcaatgacctggtggtccgtgacttccctacgctggcattatccagatcaggtgatacgggtatttctcagccttcacgcagaagggcaccccgagtcgtttggttgcgatgataaatcgcagaggaggatggtaatgtccagcgcacgcgttgtaaacgaggaaaaacggcagttttacaatcgcgttaataaattatttgatataactatccagcaccttcagaacgacatccagatcttcttcacgttttagctcatccccctggtgaacgatgtgttccgtcagatgacctttaatcacttcccgcatcagaccgtttaccgcgccacggatagcagcaatctgttgtaaaactgcagcgcattcgtgcggctcgtcgagcattttcttgagcgccacgacctggccctgaatcttactggcacgcgctttcagtttctgtttatcacggattgtatgagacatggcaacacctggttaacaagaatatgaaaaatcatagcactattaatctactggggggtagtatcaggtactgggggggagtagaatcagattgccgaattaatactaagaattattatcatgaccgaatttacaactcttcttcagcaaggaaacgcctggttcttcatccccagcgccatcttacttggtgcgcttcatggcctggaaccagggcacagtaaaacgatgatggcggcgtttatcatcgccatcaaaggcaccattaaacaagcggtgatgctcggactggcagcaactattagccataccgcagtggtctggttaattgcctttggcgggatggtgatcagcaagcgctttactgctcaaagtgcagaaccgtggctccagctgatttccgcagtgatcattattagcaccgcgttctggatgttctggcgtacctggcgcggcgaacgcaactggctggagaatatgcacgggcatgattatgagcatcatcatcacgatcacgaacatcaccacgaccatggacatcatcaccatcacgaacatggcgagtatcaggatgcccatgcacgagcccatgccaatgacattaaacgacgctttgatggtagagaggtcaccaactggcaaattttgttatttggcttaaccggtggccttatcccctgcccggcagcaattaccgtgctgttgatatgcattcagttgaaagccctgacactgggcgcaacactggtcgtcagtttcagcattggcctggcgttaacgcttgtcaccgtaggcgttggcgcagcaatcagcgttcagcaggtcgcaaaacgctggagcggatttaacactctcgctaaacgcgccccctatttttccagtctgttgattggcttagtcggtgtgtatatgggcgtacatggcttcatgggcataatgcgataactcaatcctttaggcttgcatgttatcttcagcccaggatgattcttaaatcagctatttccgctgactctctgctcgctaaggatgcttttagggcatcctttcatttacactttttacgaaatcatgggatcactaacaaaatatcgcttgtcagttatattgtatggcaggaaagatatgcgactgatattacagatccccaaagtggagagtttatgaccattaaaaataagatgttgctgggtgcgcttttgctggttaccagtgccgcctgggccgcaccagccaccgcgggtagcaccaataccagcggaatttctaagtatgagttaagtagtttcattgctgactttaagcatttcaaaccaggggacaccgtaccagaaatgtaccgtaccgatgagtacaacattaagcagtggcagttgcgtaacctgcccgcgcctgatgccgggacgcactggacctatatgggtggcgcgtacgtgttgatcagcgacaccgacggtaaaatcattaaagcctacgacggtgagattttttatcatcgctaaaaaaagccccctcatcatgagggggaaatgcagacaccttgttattttttattattagccacttgctcgtcttgcttgttattagtcgtatttcacgttgattaatgcggttgcctccagtgcgccagatttaactttgtttgtatcgtagacgtagtaactggctgttatcggaatactaaccgttgtatctgtaagtttactcttcgccgcaacttcctttaaatttgtatatcctttactgctgttagtgatatttaaaagtgtgactgggctaccattactttcaagaataaatcctacgccattatcttccgcacctttcagtattgtgttgctgttggttaacaagtcagaactacttaaatacacctgcattttccgacttgtttgattttgttgacctaataaatttttacaacgcagaataatatccccttgtttactatttattgttgctttgttacctgtggctggtaattgactaacgggaatactgtctaaagtaattaataaatcgtccggtttgcaggttgtggttatcgggttgtaactcaatgtcagattaaaggaatagacacctgcattttgtgccaatgcatttctgtagctatttacacatgcatcccaactcttgccacctaataaacacagtagaaattgtactgcggcactcccgcgtgtgctactactagcactggataatgtcgcaacaccattaatcatcacactaccgccgccccccgcagaaacattcacttttgcattactggccgcaggtgtcaccgtaacactataaccactggtgaaactggtctgattattactcaacgtgatgttgtttttattggtccattcaaaatgtaaatttaattttatggtatcgttataaagtccaacaataatatcgctcgggctcataggggtgatagtatttgtacttacgcaactgctatcattaaaattatgctcatatgtcgccatttgtgtttgagtaagtgcaaaatccccctgaacaaccaagttgtgctgaacagataactcactataacatgccgcatagctcacaggcataaccatcatcattaatataaatagcattatgcgaatttccatagaaccacctgactattactggcaaatataatttctactttcatcaatctctttaccgaaggtgattgtgcaactaagtccttgttgcttatcaattgccacattaacgcttggcggtacttcattggtgcgaataaataactgacttccctggccgacaacgccaatattatgaccatggatatcattgacttcataaccaaacgttaaactttgcccatctgctcttaacgcttttataaaccatggcttgcgctgatcggtatcaaaattaaccagtacaaccgcgccgcgataaggggcggcaattttccggttgccacgtaattctgcttcgctatcgctttggctcacatccagcatcaggtgattttcccgataaggtgtcattccgtcgtatatcaccactccattacggtttgttgtgcgatatttttgcccattgacataagcatctttaattcctggcgcattcatcacagcaaacgtttcggaaagacggttcgccagattaacgccaccgctccaggcgacaatgcccccactaacactggctccagcctgtcgataagtactgctctgactataactgccattcactgtcgcaaccggcgcgttccaggtcaaattcgccccagctgtcgtttcatttccctgatgttgatgactcaggttgacaccataattgaactgatcccgactccctactgttccacttaatcccgtattattactggcaaacccctgatcatcaaacgtcgtactgttagacatatatatttgccgacgaggcgtgctaacgtcatcaccccaatcaaagggaatgcttataaaaatattaaaacgtttctcttcatgatgattctcgtcataagcctggcttgccgcgagggtatagcttatccgtcgcaggttgttggaataactcaactgataatccttactactgccgctacgcccccagtaatctcgccataacgtacttaaactcacagacccccaaccttctggcaaactctggctcatattggcggaaaagctatttttgcggccaaaatcgttctggtaataatcggcaatgtcatagacatcgttttcatcacggcgataattatctttattgtttgcccaaacgtgatcgttaaatgtccggtaatcacggctgctataacgccaggccgccagaccaaaacgcgtgctcgtttggctcacaaacttgttgtaggcaatttgataactttgcccgtcaaacacatcgccgttgtcttgtttactatggctcttagtggcatcgacggaaatggcaccaatgcgtgtattccagccagcccccaaagtaaacgcgtaataattattcgcgaccatgctgccaccatacagcgtcaataaattattaaaaccatactgataacccgcctggacaaaatcactttgtttgctcgccccttcaatatggctacgacccgccgctaaatcatatttgctcacgccgggttgcagcatatttggcaccgctgcataaggcaccagataggtggttacgctgccgtccgcctctttcacgctgacatcaagatctgctccaccaccggccaactgcaaatctgtaatcgcgaacgggccaggaggaacctctttctgataaaccacaaaaccattctgttcaatagttaccagcgcgttactctgagcaatcccctgcacccgtggcgtaaaattttgtttgctgttaggcaacatctgcatatcacgaaacaaccgcacacctctgaagcgaacagaatcaaaaatatcgctacttgtgtacatatcacccacgcgaagcgtgccgagaagttgggcaaatccacgttccagatacagggtattgcttttccacacccctggattgttatttgttttactgaaactggcatcagaatgcagttgccaccccagtaaatttaacccgctgttaaaacgtacatatgtactcttgttattaccgctcgctttatagtcgctgtaatactgactcagataataagaggtataaaacgcattaataccccgctcccagttttccggtggaacatagccactttccagttcttccacccaggcctgcgggacactgaaatcgagacgaaaaaccccgatatcccaggtatagctcccaccctgaacaagttgctcaaatgttaaacattgcttaccgctggcgaagttatcgctattaatgcctaaccgcttgataacttctctacttaaacatgtttcttgcgggttgtctttaacaataatctcatatttcccgcgccattgcttattgacataaatatcgatgtcatactgccccggtaagggttgattatcatcaagacgaatatttgcaacctgctggtctttcattccacctatcataaaatgggtatcaaaggtttcttcagctgcataagcttcaatgccgagcaataacgctacgattgcacttgcaagtggggtcattctcaacataggcagctcctgcaattaaattttgtcactaatatagttgccatggtcatcgataatggtcagatgccagttatttgcattattacttttgacattaacactctgactttctaagggggcaatcataatagtttcataattgactttgacattattagctttgacatcgctaatcgtcacccaattagcactgtcattttttatcaccaaaccattgccactgcgatttaccagcaattttttaaatgtcgctttatttaccggagcaatacccgctggccggtaaaacaacttaattctgttttgcatcgcaaacttcagtgcattcttaccttcttgctctggactatttggtggaatatccagaacattcagataaaaaatgctttctttattagtgggcagtttattcggcataattttgatttttacttgctgcccggaatttgcccctatttttgccactggtggcgttaacatgaaaggaacctgaattttttctggtggtaaactcgtatcgccatcatcaatccacgcctgcagcaggctagaacggtttccctggttcatcaactgcaccatcacttctttattttctgccgggtaaataatgcgcgtcccgtagataacaattccggcatgtgcaggaaggaccatagaaaaaatgagtaaagataataatcctttcattttaatgcctcttaaattaaaaggccgccatgggatagcggccatgtttattacctggagaaacttacaattttatttattaatcctgcgccacacgcataaccagagaagataacacatcaccactttgcacactgttatctgtcagtttcaggtattttgctttaaacggaatagcatattgaccttccgctgttttataactctcaatgttaaaaggtgcagaaacatccaggacatcgctgttatcacctaaatagagatagtaacccacggtatcgttgctactggctatcgccttatcgttaccggttattttatcgttggtaatcaagctgagttttacaccagcaacttctttcgggcagctaatttttaacatgctgctggttacaccgactgcatcatcataggtagaatatttagctttaccttcaaagacactggttggtacagtcggcatattaatacttacactatcaccacccgcttcgaatttacacggagattctgcaatattccccttaatagttaatgttccggtatcaacgtctgcagcaaatactccagcgctcataaaaaaagaagaaaagacagcggcagcaataatactacgtttcataatatgttccttaataaaatttatttttggttgttaagagtctgtatctcttggaaacaaatttctcacatcaaaaaagttgccgcaatgtaaacacattgttttattgatttaaaacaaattaaccattgcaatataaatacaaaaaatatttaagagtattaactatttatcgcatctatcaattaatgtagatttatgtaaatggtattgttgatatcaataaaaaagccgaaatcatttatataaatgatttcggctttctaaatgcaattaaaatcaggttgccaaattaatcgtagcgatttaacacgattcgacgtttgctatcgctacctgcaacaaccacttctgtcgttacacctttgacggggctagaaaacagatgacgggtgtcaacattatacgttaactgaccacaatgctgttgaggttgaccattaaccatagccatactgcatgttgggggactgatcctgccattaatcgctaatgtggcagtctcactagagaatgcgggagaagccaatccataggcaagaaaaataattccactcagccaatacttattcattgaacgttatccctgtagtaaaggttatgcctggatagaatgagtgcataacaaactatagctgtacatccactacacagccacgaaggatgataatgaagcattgcctgtatgatcaatcgactttgtagagtttcggacgaaggtccgcagaatattcgcagtattaaataagtgttcattaatgcggcaaaaactaatacaccgcatcaatgtaacatctctgcggtgtatgaagaataaccagaatggttaataggcgttagaccgcgcggaaggaaatctcgcctggaatgacttcaccctgccagtagagctgagctgcaacgcggtcagccagctggcggtagatagcggtaaattcgctctccggacggctgataaccgttggcgtacctttatcgagatcctcacgtaaggagatgtgtaacggcatctgccccagcagctgtgtatggtatttttcagccagtttctctgcaccaccggtaccgaaaatcggttcatggtgaccacagttactgcaaatatgcacactcatgttctcgacaataccgagcaccggaacctcgactttctcgaacatcacaatgccttttttcgcatcgatcagcgcgatgtcctgcggggtggtgaccacgactgcaccggttactggaatgttttgcgccagcgtcaattgaatgtcaccggtgcctggcggcatatcaagcaccagatagtcgagatccggccacaaggtttcctgcaacatctgcattaacgccttgctcgccatcggtccacgccacaccatcgcattgtcgtcagtgaccagataaccaatactattggttgccaggccatgagacataatcggtgccatatgggtaccgtccgggctagttggacgctgattttctgcgcccaacattgttgggatacttgggccgtagatatcggcgtccagaatgccgactttcgccccttctgccgccagcgccagtgccaggtttaccgccgtggagcttttacccacgccgcctttaccggaactcaccgcgataatgttcttcacaccgttaattcccggctgattcttcacgcgtttcagagtggctatgttatggctcagtttccagtcgatagctttcgccccggtgatgcgcagcagttcggcgctacattgctcttttaactcttcgaacgcgctatgccagacaaacggcataaccagttccacatgcaacgtgtcgtccatccaggcgacatggtgcaacgctttcagcgtggtgaggttatgcttcagggttgggtgctgaaaattggccagtgtcccggcgaccattgcgcgcaaggcttctggacttttggcctgggattgttcgttcatcccgactccttttttgtatagataaaccatcagctgatagtttacctgaagaatatagagaagtacttacttaacattttcccatttggtactatctaaccccttttcactattaagaagtaatgcctactatgactcaagtcgcgaagaaaattctggtgacgtgcgcactgccgtacgctaacggcagtatccacctcggccatatgctggagcacatccaggctgatgtctgggtccgttaccagcgaatgcgcggccacgaggtcaacttcatctgcgccgacgatgcccacggtacaccgatcatgctgaaagctcagcagcttggtatcaccccggagcagatgattggcgaaatgagtcaggagcatcagactgatttcgcaggctttaacatcagctatgacaactatcacagcacgcacagcgaagagaaccgccagttgagtgaacttatctactctcgcctgaaagaaaacggttttattaaaaaccgcaccatctctcagctgtacgatccggaaaaaggcatgttcctgccggaccgttttgtgaaaggcacctgcccgaaatgtaaatccccggatcaatacggcgataactgcgaagtctgcggcgcgacctacagcccgactgaactgatcgagccgaaaagcgtggtttctggcgctacgccggtaatgcgtgattctgaacacttcttctttgatctgccctctttcagcgaaatgttgcaggcatggacccgcagcggtgcgttgcaggagcaggtggcaaataaaatgcaggagtggtttgaatctggcctgcaacagtgggatatctcccgcgacgccccttacttcggttttgaaattccgaacgcgccgggcaaatatttctacgtctggctggacgcaccgattggctacatgggttctttcaagaatctgtgcgacaagcgcggcgacagcgtaagcttcgatgaatactggaagaaagactccaccgccgagctgtaccacttcatcggtaaagatattgtttacttccacagcctgttctggcctgccatgctggaaggcagcaacttccgcaagccgtccaacctgtttgttcatggctatgtgacggtgaacggcgcaaagatgtccaagtctcgcggcacctttattaaagccagcacctggctgaatcattttgacgcagacagcctgcgttactactacactgcgaaactctctagccgcattgatgatatcgatctcaacctggaagatttcgttcagcgtgtgaatgccgatatcgttaacaaagtggttaacctggcctcccgtaatgcgggctttatcaacaagcgttttgacggcgtgctggcaagcgaactggctgacccgcagttgtacaaaaccttcactgatgccgctgaagtgattggtgaagcgtgggaaagccgtgaatttggtaaagccgtgcgcgaaatcatggcgctggctgatctggctaaccgctatgtcgatgaacaggctccgtgggtggtggcgaaacaggaaggccgcgatgccgacctgcaggcaatttgcagtatgggcatcaacctgttccgcgtgctgatgacttacctgaagccggtactgccgaaactgaccgagcgtgcagaagcattcctcaatacggaactgacctgggatggtatccagcaaccgctgctgggccacaaagtgaatccgttcaaggcgctgtataaccgcatcgatatgaggcaggttgaagcactggtggaagcctctaaagaagaagtaaaagccgctgccgcgccggtaactggcccgctggcagatgatccgattcaggaaaccatcacctttgacgacttcgctaaagttgacctgcgcgtggcgctgattgaaaacgcagagtttgttgaaggttctgacaaactgctgcgcctgacgctggatctcggcggtgaaaaacgcaatgtcttctccggtattcgttctgcttacccggatccgcaggcactgattggtcgtcacaccattatggtggctaacctggcaccacgtaaaatgcgcttcggtatctctgaaggcatggtgatggctgccggtcctggcgggaaagatattttcctgctaagcccggatgccggtgctaaaccgggtcatcaggtgaaataatcccccttcaaggcgctgcatcgacagcgccttttctttataaattcctaaagttgttttcttgcgattttgtctctctctaacccgcataaatactggtagcatctgcattcaactggataaaattacagggatgcagaatgagacactttatctatcaggacgaaaaatcacataaattcagggcagttgagcaacagggaaacgagttgcatatcagttggggaaaagttggcaccaaagggcaaagccagataaaaagtttttcagatgctgcggcagcggcaaaagcggagcttaagctgattgcggagaaggtgaagaaggggtatgtggagcaagcgaaggataattctttgcaaccttcccaaacggtaacgggctctctcaaggtagcggacttatccaccattattcaggaacaaccctctttcgtagcagaaacccgtgcgcctgacaaaaatacagatgctgttttaccgtggctggcgaaagatattgctgtcgtttttccgcccgaagttgtacacaccacgttaagtcatcgccgctttcccggagttcctgttcagcaagcagacaaattgccccaattacgtcgcttagcctgtagtgtgtcgcaacgggataataaaacagccacatttgacttcagcgcctgttctttagaatggcaaaacaccgtcgcccaggcgatcagtcagatcgacggcctgaaaacaacacagttaccatcaccagtaatggctgtactcacggcacttgaaatgaaatgcacaagatataaagtgcgtgaggatgttatggatcagatcgtccaggaaggcggtctggaatatgctactgatgtaataatacaccttcaacagattgatattgaatgggattatgcgaataatgtcattattattctgccgtctggcattgcacctagctacttggagcaatattccagatttgaatgacgcctacgtaaacatttatcactgacggaagagtctctctggcaaaaatgtgcacaaaaacttattgccgcaattccacatattccagaatggcggcaaccattaattgctttgttattacccgaaaaaccagaaattgcacatgaaattgcccagcgtctactggggcaaaaaaaattaccctcgcttgagtggttaaaaatagtggcgactgatgagcacattcttgcctcattagaaaaatatcacgaaccatatgccatttttgatgattactattgtggtgcgatatggtcagccaccgtattacaggagcaaggtgttgcagccctgccccgatttgctccctatgccgcaagtgactactgcgccgatgtgttgcgtcatatcaatcatccgttcgcattgacactgcttatacgtgtagccgggcaaactaaacgctgtcacgatcggatgacgaaagccattgctgcgttcccacatgcagcaatggcggcactgacggaacttcttgggcaaaaagaagagaacagttggcgcattatgctaatgacaatgcttatctcacaaccagcactggcagaacaggtcattccctggctctcgacacccgcagttgccgtactgaaatcatgccagcaacaactgacacagccctcaaaccatgccagcgccgatctactgccagccgtagtagtctcccctccctggctttcgaaaaagaaaaaatcgccgattccggtgctggatttagcgccattaggcattgagccaatctgttatctgacagaagaaatcagtaatcaacttttggcgaaatatatctggtattcaaaacacatcacggttagccatgaagaaagtactaccaacctgttggcaaggatgggttttcaacgacggatcgctggtacatatattaaagctcccgaagcggtagttgaggcatggctaaatgaagattattcaaccttactaagtgaatttaaggtgtttcattcacctaccgggcattattggcagttggggattttgacaacattgccgctggagaaagcagtaaaagcatggaatgcccttaccctatctccacataccgataccgaatactccatgttacattttggactcaaagggttacctgggttagtaaactcacttgcacgctatccacaagaagccttgcccatcacgaattacttcgcagcgagtgagctggctcctgccgtcgcccgtgccttcaacaaactgaaaacgctacgcgaaaacgcccgtagctggctgttgaaatacccggaacatgcccttaccggcctgctgcctgcggcgctcggcaaagccggtgaagcacaggataacgcccgcgctgccttgcgtatgcttaccgaaaacggtcatcagccattactgcaagaaatcgcccgacgttataaccagccggaagtaaccgatgcggtgaacgctctgcttgcgctcgatcccttagataatcacccgacaaaaatccccactcttccggccttttatcagccatcgctctggacgcgcccggtattaaaagcaaatgcccaatcactgccagatagcgccctcctccaccttcggtgaaatgctccgcttccctcaggaagaggctctgtatccgggattattgcaggtgaaagacgtctgttccgccgactcactggcgggatttgcctgggatctgtttaccgcctggcagaccgctggcgcgccgtcgaaagagagttgggcgttcactgcgttaggcgttctcggtaacgatgacaccgcccgcaaactgacgccattaatacgcgcctggcctggtgaatcccagcataaacgcgccaccgttgggttggatattctcgctgctatcggtagtgatatcgcccttatgcagcttaacggcatcgcccagaaactgaaattcaaagcattacaggagcgggcaaaagaaaaaattgccgacattgccgagagccgcgaactcacggtggcggagcttgaagatcgggttagcaccggatctcggtctggatgataacggttcgctgctgctggattttggcccacggcagttcaccgtcagctttgatgaaaccttaaaaccgtttgtgcgtgatgtttccggcagccgcctgaaagacctgcccaaaccgaacaaaagcgatgatgaaacgcgggcgaacgatgcggttaaccgctacaaattgctgaaaaaagatgcgcgtaccatcgccgcccagcaggtagcaaggctggaatccgccatgtgcctgcgccgccgctggtcgctggaaaacttccagctcttcctggttgagcatccgctggttcgtcacttaacccgccgtctgatttggggcgtttatagcgccgaaaaccagctactggcttgctttcgcgtagcagaagataacagctccagcaccgctgacgatgatcttttcaccctgccggaaggcgatatctctatcggcactcctcacgttctggaaatatcaccaacggatgctgccgcctttggtcagctttttgccgactacgaactgctaccaccgttccgccagctcgaccgtaacagctacgccctgacagaagccgagcgcaatgccagtgaactgacccgctgggcaggcagaaaatgcccgagtggtcgggtcatggggctggcgaataaaggctggataaagggcgaaccacaggatggaggctggatcggatggatgatcaaacctttgggtcgctggtcgttaatcatggaaatcgatgaaggctttgcggtaggcatgtcgccagccgaactcagcgctgagcagctcttaagcaagctgtggctatgggaaggcaaagcagaaagatatggctgggggagtaattcaacacaggaagcgcagttctccgtaatcgatgccatcaccgccagcgagctaattaacgatattgaagccctgtttgaataaggaaagagcatggacaaggaattaccgtggctggcggataacgcccaactggaactgaaatataaaaaaggcaaaacgccgctcagtcatcgtcgctggccgggcgaaccagtgtccgttatcactggaagtctcatccagacattgggtgatgaattgctacaaaaagctgagaagaaaaaaaacattgtctggcgttatgagaattttagtctggagtggcagtccgccatcacgcaggccatcaacttgatcggcgaacacaaacccagtatcccggcccggacaatggcggcgctagcctgtatcgcgcaaaatgacagccaacagttgctcgacgaaatcgtccaacaagaggggctggaatatgcgactgaggtggtgattgcacgccagtttattgcgcggtgttatgagagtgatcctctggtagtgacattgcagtatcaggacgaggattatggctatggttatcgcagtgaaacctataacgaattcgatctccgactgcgtaagcatctctctctggcagaggaaagctgctggcagcgttgcgccgacaaactcattgccgcactaccaggaataaacaaagttcgccgcccttttattgcgctgatcctcccggaaaaaccagaaatagccaatgagttggtaggccttgaatgcccgcgaactcattttcattctaaggagtggttaaaagttgttgctaatgaccccacagcggtgagaaaactcgaacactactggagccaggatatatttagcgatcgagaagccagctacatgagccatgaaaaccacttcggctacgcggcctgcgccgcccttttgcgcgaacaaggactggcagccattccgcgcctcgcgatgtatgcccataaagaagattgcggcagtctgctggtacaaattaaccatccgcaagtcatccgcaccttgctactggtggctgataaaaacaaacccagcctgcaacgtgtagctaaataccataaaaacttcccccatgcgacgctcgccgcactggcagaactgctggcgttaacagaaccaccagcccgccctggttatccaatcatcgaagacaaaaagctgcctgcacagcaaaaagcacgcgatgaatactggcgtacgctgttacaaacgctgatggcaagccagccacaactggcagcagaagtgatgccgtggttaagtactcaaccccagagtgtgctgaagagttatttaagcgcaccgcccaaaccggttattgatggcaccgataacagcaatctgccagaaatcctcgttagtccaccgtggcgtagtaagaaaaaaatgacagctccacgtcttgatttggcaccgctcgaattaactccgcaagtttactggcaaccaggcgaacaagagaggcttgccgccactgagcctgcccgttatttcagcacggaatctcttgcgcaacgcatggaacaaaaaagtggacgagttgtattacaggaactgggttttggggatgatgtatggctgtttctgaattatatactccccggaaaactggatgctgcacgcaatagtctctttgttcagtggcattactaccaggggcgggttgaagagatcctgaatggctggaactccccggaagcacaattagcagaacaggcgctccgcagcggtcacatagaagcgttaattaacatatgggaaaatgacaactacagtcattatcgtccggaaaagagtgtctggaacctgtatttattggcacagttgccgcgtgagatggctttgaccttctggctgcgtatcaatgagaaaaagcatctgttcgcgggtgaggactattttctcagtatcctcggattggatgcgctaccaggtctgctgttggcttttagtcatcgtccaaaagaaacatttccgttaattttaaattttggcgcaacagaactggcgctgcctgttgcccacgtctggcgacgtttcgcggcgcagcgtgatctggctcgccagtggattttacaatggccggaacatacggctagtgcacttatccctcttgtctttaccaaacccagcgataatagcgaagccgcattacttgccctgcgtttactgtacgaacagggacatggcgaattgctacaaaccgtggcaaaccgctggcagcgtacagatgtatggtctgccctggagcagttgcttaaacagggtccaatggacatttacccggcacgcattccaaaagcccctgatttctggcatccgcaaatgtggtccaggccgcgccttatcactaataatcaaactgttaccaatgacgctctggaaattatcggcgaaatgctgcgctttacccaggggggacgtttttatagcgggctggaacaactgaaaacgttctgccagccacaaacgctggcagcttttgcctgggatctcttcactgcgtggcaacaagctggtgcccccgcaaaagacaactgggcatttctggcgttaagtctctttggtgacgaaagcacggcacgggatctgacgacacagatcctcgcctggccacaagaaggcaaatctgcccgtgctgtcagcggcctgaacatccttaccctgatgaataatgatatggcgctgatacagctgcatcatataagccaacgggctaaatcccgccccttacgtgataacgcggcggaatttcttcaggtggtcgcagaaaatcgcgggctaagccaggaagagctagcggacagattagtcccaaccctgggccttgatgatccgcaggcgttgagttttgattttggtccccggcagtttaccgttcgcttcgatgaaaatctcaacccggttatctttgatcagcaaaacgttcgccagaaaagcgttccccgtttgcgcgccgatgacgatcaactgaaagcgcccgaggcactggcccgactaaaagggctaaaaaaagatgctactcaggtgagcaaaaacctgctcccgcgtcttgaaacggccctacgtaccacccgacgctggagcctggcagattttcattctctgtttgttaatcatccctttacccgtctggttacccagcgattaatatggggggtttatccggcaaatgaaccgcgttgtttactcaaagcctttcgtgtggccgcagagggggagttctgcaatgcgcaagatgagccaattgacctgcctgcggacgctctgattggcattgcccacccgttagaaatgacagcagaaatgcgcagtgaatttgcacagctttttgccgattacgaaattatgccgccttttcgccagttgagccgccgcacggtgctgctcacacctgacgagagtaccagtaacagcctgactcgctgggaaggtaaatccgctaccgttgggcaacttatgggaatgcgatacaaaggctgggagagtggctatgaggacgcatttgtctataacctgggtgagtaccggctggtccttaagtttagtcccggttttaaccactacaatgttgatagcaaagcgctaatgagcttccgttctcttcgagtgtaccgtgacaataaatccgtcacttttgccgaacttgatgtgtttgatttgagtgaggcgttaagcgcacctgacgtcattttccattaaaacacagcgggcagtgatgcaactgcccgttatcaacacgacttaccagcggggaaagcgatgatcgtgcaaaaagagctggttgctatttacgattatgaggtccctgtacctgaagatccgttttccttcagacttgagatccataaatgctctgaattatttacaggttccgtctatcgactggagcgattccggctacgtccaacatttcatcaacgtgatcgagaagatgctgacccgctaataaatgatgcgttgatttatataagagatgagtgtattgatgagcggaaattacgaggtgaaagtcctgaaactgtaatagcaatttttaatcgtgaactacagaatatattcaaccaagaaatagaataatatactctaaataattcaaattggtccgatccggcgcaacgtcccaatggcctggattataaatctcattatcttaattgcaacggggtccagccgtggttataattcgttcgttggaacacgatgttgcacaggctgtggtgttaggcctgaaaatagtaaataaaagaacctgcctcaccagcaggtttttttatttactgtgatctgctttccagatatttttcgctcaaacaactaatgcgccaaacatttattgcgcgtaaaatatcgtttatttcattaatacatttcagggatgaatatatgagtccgcagaataatcatctgcagcgtccgcctgctgctgtgttatacgccgatgaactggcaaaattaaaacaaaatgataacgcaccttgcccgcccggttggcagttaagtttgcctgcggcccgtgcttttatccttggcgacgaagcgcaaaatatcagccgtaaagtggtgattagcccctccgctgtcgaacgtatgttagtcactcttgctaccggccgcggtttgatgttggtgggggaaccgggtaccgcaaaatctcttctttctgaattactggcaaccgctattagcggcgatgccgggttaaccatccagggcggggcatctaccaccgaagatcaaatcaagtatggctggaactacgccctgcttatcaatcatggtccgagtacggaagcgctggtccctgccccgctttatcagggaatgcgcgacggcaaaatcgtccgtttcgaagagataacgcgtacaccgctggaagtgcaggactgtctgttaggtatgctttctgacagggtgatgacggggccggaactcactggtgaagccagtcagctctatgcgcgagaaggctttaatattattgccactgccaatacccgcgatcgcggcgtcaatgaaatgagtgctgcgctaaagcgtcgcttcgattttgaaacggtttttccgattatggatttcgcccaggagttggaactggtcgccagtgctagcgcgcgtttgctggcccatagcggtattccgcataaagtgcctgacgcggtactggaattactggtccgcaccttccgcgatctgcgtgccaacggcgaaaagaaaacgagtatggatacactgacagcgattatgtccaccgctgaagccgtgaacgtggcccatgctgtgggcgtccgcgcctggtttttagcgaatcgcgcgggggagcctgccgacctggtggaatgtattgccggaaccatcgtcaaagataacgaagaagatcgcgcgcgtctgcgccgttacttcgaacagcgtgtcgccacacataaagaagctcactggcaggcttattatcaagcccgccaccgcctgccgtgaggaaagatgcatgagcgagccgttaattgtcggcatccggcatcatagtccggcctgcgcccggctggtgaaaagcttaatcgaaagccagcggccacgatacgtgttgattgaaggcccggctgattttaatgaccgggtagacgaactgtttttagcccaccagcttccggtagctatttacagttattgccagtatcaggacggtgcagcccccgggcgtggtgcctggacgccatttgctgaatttagcccggagtggcaggcgctacaagccgcacgtcgcattcaggcacaaacttacttcatcgatttgccttgctgggcgcagagtgaagaagaggacgatagccctgatacgcaagatgaaagccaggccttactgctgcgtgccacccgcatggataacagcgataccctgtgggatcacttgttcgaagatgaaagccagcaaactgcattaccctctgcgctggcgcactattttgcccaactgcggggcgacgcctccggcgatgcgctcaatcgtcagcgcgaagcctttatggcccgctggattggatgggcgatgcagcaaaataatggcgacgtgttagttgtctgcggtggctggcacgctccggcactggcaaagatgtggcgcgaatgccctcagaaaattaacaagccagaattgcccagcctggcagatgccgttacaggttgttatctcacaccctacagtgaaaagcgccttgatgtgctggcaggataccttagtggaatgcctgccccggtatggcaaaactggtgctggcagtggggcttgcagaaggccggtgaacaactgctaaaaactatccttacccgtttgcgccagcacaaattgcccgcttctaccgcggatatggctgccgctcatctgcatgcgatggcgctggcacagttgcgcggtcatacactaccgttacgcactgactggctggatgccatagcaggcagcctgattaaagaagccctgaacgcgccgttgccgtggagctatcgcggcgttattcatcccgataccgatccgattctgctaacgttgatagacacattagcgggtgacggattcggtaaacttgccccttctacgccacaaccgcctctgccaaaagatgtcacctgcgaactggaacgtaccgcaatctcccttccggcggagcttaccttaaatcgctttacccccgatgggctggcgcaaagtcaggtgttacatcggctggcaatactggagatccctgggattgtacgccagcagggaagtacactgacacttgcaggcaacggtgaagaacgctggaaattaacccgcccgcttagccagcatgcggcattgattgaggccgcctgttttggtgccacactccaggaagccgcacgcaataaattagaagccgatatgctggacgcgggcggaatcggcagtatcaccacatgtcttagccaggcggcgttagcgggtctggcgtccttcagtcaacaattactggagcaactcacactattaatcgcccaggaaaatcaatttgccgaaatgggccaggcgctggaagtgctttatgccttatggcggctggatgaaattagcggtatgcaaggcgcgcagatattacaaacgacgttatgcgcgactatcgatcgcacgctgtggctgtgtgaatctaacggcagaccggatgaaaaggagtttcacgctcacctgcatagctggcaagcgctttgccatattctgcgcgatctacatagcggcgttaatttacccggcgtttctctttctgcggcggtagccttactggagcgacgcagtcaggcaattcatgccccggcgctggatcgcggcgcggctcttggcgcactaatgcgtctggaacatcccaacgccagtgccgaagcggcgctgacgatgctggcgcagttatccccggcacaatctggtgaggcgctgcacggtttgctggcgctggcccgccatcaactggcctgtcagccggcatttatcgccggtttcagcagtcatttaaatcaactgagtgaagccgattttattaacgccctgcccgatttacgcgcggcgatggcctggctaccaccacgagaacgcgggacgctggcgcatcaggtgcttgagcattatcaactggcgcaacttcccgttagcgcgctgcaaatgccgttgcattgtccaccacaggccattgcacatcatcaacaactcgaacagcaggcactggcaagcctgcaaaactggggagttttccatgtctgaactgaacgatcttctgaccacccgtgagctacaacgctggcgattaattcttggcgaagcggcagaaacgacgctttgtgggctggatgacaacgcccggcagatagaccacgcgctggagtggctgtatgggcgcgatcctgaacggctccagcgtggtgaacgttccggtggattaggtggcagtaatctcaccacccctgagtggatcaacagtattcacacgctgtttccgcagcaggtgattgagcggctggaaagcgatgccgtgctgcgctacggcattgaagatgtggtgacgaatctcgacgtgctggaacgtatgcagccttctgaaagcctgctacgcgctgttttgcacaccaaacatctgatgaaccccgaagtactggctgccgcccgccggatagtgtgccaggttgttgaagaaattatggctcgactggcaaaggaagttcgtcaggctttttctggtgtccgcgatcgccgtcgccgtagttttattccactggcgcgaaactttgatttcaaaagtactctgcgcgccaacctgcaacactggcacccgcaacacggcaagttgtatatcgaatccccccgctttaacagccgcattaaacgccaaagcgaacaatggcaactggtcttactggttgatcaaagcggaagcatggtcgatagcgtgatccactctgcggtgatggcggcctgtttgtggcagttacccggcattcgtacccatctggtggcgtttgacacaagcgtcgttgatctcacggcagacgttgccgatccggtagagttattaatgaaagtacagttgggcggcgggaccaatatcgccagtgccgtggagtatggtcggcaacttattgaacaaccagcgaaaagcgtcattatcctcgtgagcgatttttacgaagggggtagtagtagtttactgacgcatcaggtgaaaaagtgtgttcagagcggcatcaaagtgctgggactggcagcgctcgatagcaccgcaacaccttgctatgaccgcgatacggcccaggcgctggttaatgtcggcgcacaaatagccgccatgacgccgggcgagctggcaagttggcttgcggagaatcttcagagttgacataacttgcggagaatcttcagtcatgaatagtctacgtccggaattattagaactgacaccgcaggccctgacggcgttaagcaatgccggttttgttaagcgcagtcttaaggaactggaaaatggcaacgtcccggagatcagccatgagaacgacgctttaatcgccaccttcagtgacggtgtccgtacccagctggcgaacggccaggcactgaaagaggctcagtgcagttgcggggccaacggtatgtgccgtcatcgcgtgatgctggtgttaagttatcaacgactttgtgccaccactcagtctacggaaaaagaagaagagtgggatccggcaatctggctggaagaactggctacccttcccgatgctacccgcaaacgcgcacaggcgctggtcgctaaaggcatcaccattgagttgttctgtgcgccgggtgaaattccctctgcccgcttaccgatgagcgatgtgcgtttttattcccgcagcagtattcgtttcgcccgttgtgattgtattgaaggcacactttgcgaacatgtcgtactggcggtacaggccttcgtcgaggccaaagcgcagcaagcagaatttaaccatttaatctggcagatgcgcagcgaacacgtcacaagttctgacgatccgtttgccagcgaagaaggcaacgcgtgtcgtcaatatgttcagcaattaagccagacattatggcttggcggcatcagccagccgctcatccattacgaggcagcattcaaccgcgcattgcaggcggcagagacctgcaactggcgctgggtgagtgaaagcctacggcaactgcgcgccagcgttgatgccttccacgcccgcgccagccactataatgccggagaatgcttacatcagcttgcggcattaaacagtcgattaaattgcgcacaagagatggcccggcgcgacagtattggtgaagttcctcctgtgccgtggcgcacggtcgttggctctggcattgccggagaagcaaagcttgatcatctgcggctggtgtctttaggtatgcgttgctggcaggatattgagcattatggtttacgcatctggtttaccgatcccgacaccggcagtattttgcaccttagccgcagttggccgcgaagtgaacaggaaaacagtccggcagctacgcgtcggctgtttagttttcaggctggcgcactggcgggcgggcaaattgttagtcaagcagcaaaacgcagtgccgatggcgagctgctgttagctacccgcaaccgcttaagcagcgttgtgccgctgagccctgatgcctggcaaatgttgagcgcgccgttacgccagccgggcattgtggctttgcgggaatatttacgccagcgtccccccgcctgcatacggcctcttaatcaggtcgataacttatttattctgccggtcgctgagtgtattagcctcggttgggacagcagccgccagacgctggatgcgcaggtcattagcggcgaaggggaagataatgtgctgacgttaagtttaccagccagtgccagcgcaccttatgccgttgaacgcatggcggcgcttttgcaacaaacagacgaccccgtgtgtctggtttctggctttgtcagttttgttgaagggcaattgacactggaaccacgggtgatgatgacaaaaacccgtgcctgggcgctggacgcagaaactacgcctgtggcaccgctaccttctgccagcgttttgcctgtgccgtctactgctcatcagttgctgatacgctgccaggcgttacttattcaactgctccataacggctggcgctatcaggaacagagtgctattggtcaggcataattgctggcgaatgacctcaccgcggtgggtttttatcggctggcacatgtgttgggacaatttcgtaatacagaaagcgaggcacgggtagaagcaatgaataacggtgttttgctttgcgaacaattattccccatgcttcagcaacaaggatgaaatagtgctttttactaagagttctactccagttccggactgctcacgccacggtattaggcatatcctatatagcccctggtgagagtcaccagttccttgattaaataaaatggagttttacatgaaggctttcaataagctgttttccctcgttgttgcatctgttctggttttctctcttgctggctgcggtgacaaagaagaaagcaagaaattcagcgccaatctgaacggcactgaaattgccattacctatgtctacaaaggtgacaaggtgcttaagcaatcttctgaaaccaaaattcaatttgcctccattggtgcaaccaccaaagaagatgctgccaagacacttgagccgttaagcgccaaatacaaaaacatcgcgggtgttgaagaaaaattaacctataccgatacctacgcgcaggaaaacgtgactatcgatatggaaaaagtggattttaaagccctgcagggtattagtggaatcaacgtttctgctgaagatgccaaaaaaggtatcactatggcgcaaatggaactggtgatgaaagccgctggttttaaagaagtgaaataatcggttggcggtcatgctctaaacatgaccgccaattttttagccttttttcacatgctggcgcgctgccagtccacgcagaaaataacgtaaaaattgatcgccgcattcgcggaagtttttatgatccggtgcgcgcatcatcgctgtaatttccggcatgctaacgcggaactgctgttcggtgaggatagccagaatgtcatcggttttcaggctaaacgcgatgcgtaattttttcagcacgatgttgttattaatgcgacgttccggctccagtgccggagcagactcatccttgccgcgtttttcataaatcaggccattgaggaaactgctcaaaacaatgtccggacaacgctgaaaaccctcttcgtcttctttacgtagccagacggcgatctgttccgcggtggcttcgacattacccagcgccagaatacgcaccaggtcattattattggctttcaaaatgtagcgcacgctgcgcagaatatcgttacttagcatgaggccttcaggtgttgatgaggcaaaaagccattttagcagtcttttacaggccaatcgcctcttttaagcttttcagataacggcggctgaccggcacggttaagccattacgcaaaatcaactcggcctggccgttatcttccagacgaatctcctgtaaatgcgcgaggttaaccagatactgacgatggcagcgcagtagtggtgtacgactttccagggtacgtaatgtcaattcggtaaagccctctttcccttcgtggctggtaacgtagacaccgctcatccgactgctgacaaatgccacatctttcatttgcagcaaataaatccgactatgccccgtacaagggataaatttcagcgcctgttgattttccggtaacaggctaacatcctgcttgctgcgctcctgacgcaatcgcgccagcgttttctccagtcgcgcttcatcaattggcttcagcagataatcaaaggcatgttcttcaaaggctttaattgcgtattcgtcaaacgcagtgagaaaaacaatatacgggcgatgttccgggtcaagcatccccaccatttccagaccactgatgcgcggcatctggatatcgagaaacagcacatccgggcgcagtttatgcaccgcgccgatcccttccacggcgttactacactctccaacgatttcaatatcgctctgctcctgcaaaaatacacgcaggttctcccgtgctaacggttcatcatcgacaattaagactttaatcatgcctcgtccctccatggtagtcgtaacgttattcgggtgtaactatcaggctcacaggcgacgcttattccatagtcatcgccaaaccgttcacgtaaacgcttatccaccagattcatccccagcccactggcattggttaccggttgatacaaaccggcattgtcttcgatctccagcatcaaatgttgcccctcacgtcgggcgctgattgccactcgccctgtatccagcagttgacttgtcccatgtttaatggcgttttccactatcggttgcagggtaaacgcgggcaattgctgctgggataattcttgcggaatagcaatgttgacctgcaaccggctctggaagcgcgccttttcaatttgcagataagcattcacatgttcaatttcgtcggcgagagtaacaaactcgctaggccgctttaagtttttgcggaaaaaagtggaaagatactgcaccagctggctggcctgttcgctgtcgcggcggatcaccgctttaatggtgttaagcgcattaaacaaaaaatggggattcacctgggcgtgaagcagtttgatctcactctgggtgagcatcgctttttgccgctcatattgcccggcaaggatctgcgcgctaagcaattgcgcaatcccctcacccaacgtgcggttgatgctactgaataaacggtttttggcttcatacaatttgatggtgcccatcacccgctgattttcaccacgcaacggaattaccagcgtgctccccagtttgcattgcggatgcaaagagcaacggtaaggtacttcgttgccatcagcgtagaccacttcaccggtttcaatcgcttttaaagtataagtactagaaatcggtttgccgggtaaatggtggtcgtcaccaattccggtaaaggccagcaatttctctcgatcggtaatcgcgactgcaccaatatccagttcctgatacagcacctgagccactttcatgctgttcacttcgttaaacccctggcgcaaaatgccttccgtgctggctgccactttcagcgcagtggcagaaaaagcgctagtgtatttttcaaacatcgcgcgtttatcgagcaatatacgcataaacagcgccgcgccgacggtattggtgaccatcattggcgcagcaatattactcaccagacgcaccgcatcttcataaggtcgggcgatcgcaaggatgatcagcatttgcaccatttcagcgacgaacgtgacggcaccggcggtaatggggttaaagactttatcagtgcgcccgcggcggatcaggatgctgtgtaccaggccaccgagtaatccttcaacgatggtgctgatcatgcaacttaacgcggtcatgccccccatgctatatcgatgtaagccgccggtcagcccaaccagcccaccgacgaccggaccgccgagtaagccgcccattaccgcgcctatcgcacgggtattggcaatagaatcgtcaatgtgcaacccaaaccaggtgcccatgatgcagaagatggaaaagacgatgtagcagagaaatttatgcggcagacgaaccgtgacctgcattaacggtatgaataatggcgttttactcattaaccatgcaatgactaaaaaaacgcacatctgctgaagcagcagcaacaccagattaaaatcgtacatacccgcaaaccacacttccctttaaaacgcgtaacatacattgcctgcgtttaactttctttgaactcttgcagaaaaatgagaattcgtgagtacgatcactcaaaatcgcctggcaaaaataaaatcaccctatagatgcacaaaaaacgggcaaaactacctggttcgcaaaactgcgtctaaagttaaaccgggacctcgcgagcaagggtgagacgatggcgctttacacaattggtgaagtggcgttgctttgtgatattaatcctgtcacgttacgcgcgtggcagaggcgttacggattgctgaaaccgcaacggacagacggcggtcatcggctgttcaacgatgccgatattgaccggatccgcgagatcaaacgctggatcgacaacggcgtgcaggtcagcaaagttaaaatgctgctcagtaatgaaaatgttgatgtgcagaacggctggcgcgatcagcaagaaacattactgacttacctgcaaagcggcaatctacatagcctgcgaacgtggatcaaagagcgcggtcaggattaccccgcccagacactcaccacacatctgtttattcctctgcgccgacggcttcagtgccaacaaccgactctccaggcgctgctggcgatcctcgacggcgtactgatcaactacatcgccatttgtctggctagcgcacgtaaaaaacagggtaaagatgcgctggtggttggctggaatattcaggataccacccgtctgtggctggagggctggattgccagtcaacaaggatggcgcattgatgtcctcgcccacagcctcaatcaactacgccctgaactattcgaaggccgtacattgctggtgtggtgcggtgaaaatcgaacctccgcccaacagcagcaactcaccagttggcaagaacaaggccatgatattttcccactcggcatttaatgattcgttaacaaatgcgctttactgtacaatcctttcgttaacataaggagtgcattatgcgcatagctaaaattggggtcatcgccctgttcctgtttatggcgttaggcggaattggtggcgtcatgctcgcaggttatacctttattttgcgtgctggctaagcgcctgcaccagcctttcaaacaggcggtctgcgatgatcgccgccagtgccaccagtaacgccccctggatcacatacgcggtattaaatccgctaagcccgatgatgatgggcgtacccagcgtgctggcccctaccgtactggcgatcgtcgccgtaccaatgttgataatcacgctagttcgcacgcccgccagaatcaccggagccgccagcggtagctcgaccttacgcactcgctgaccacgactcattcccatacctttcgcaacttctgtcacgctggcatcaatcgctcccagcccggcaagtgtcgcctgcaggacgggcagcacaccgtaaaggatcaaggcgataatcgctggttgcagaccaaagccgatcaccggaacggcgatcgccagcactgcgacgggcggaaaagtctgtccaacggcggcaatagtttccaccagtgggcgaaattccgcgccccacgggcgagtgacagcaattccggcaccagtgccaatgatcaccgcaaacaaactgctaattcccaccagccagaaatgagccagtgccagagctgcaaaactttcttgctgataaacgggtcgtggcagttgtgggaacaaggcagcaaacagcggctggctgtaaggcagccagaaaatcagcgccacaaacagagcaatgagccagaacagcggatcgcgcaacatcttcatacgcttacgcctccaccagcagatcctgaaaatgcagcgtgccgcaaggctggccctgcatgttcaccaccggcagcacctcgcatccccgcgcaacaaacagagagagcgcatcgcgtagcgtcatctcttctgccagtgcctcaccatctgctcgttcttcgcgacgcacgtaatccgccacactacgtaagctaagcaggcgcacacccagttcactacgtccaaaaaactggcggacaaaatcattcgccggacgagtcagcatcgtcagcggattgccctgctgcactacttcaccgtgatccatcaataccagatgttctgccagccgtagcgcctcatcaatatcatgagtgaccagcacaatggtacgccccagcaaacggtgaatgcgcgtcatctcttgttgcaacgcgccgcgcgttaccgggtccagtgcgccaaaaggttcatccattagtaagacttgcggatcggcagccagtgcacgcgccactcccacacgttgctgctgaccaccggaaagctgatgcggataacgctcacgcaaattactctccagccccagtagcgccattaattcgtcgatacgatcgtcaatccgcgcccggctccatttttgtaattgcggcacggtagcgatgttttgcgccacgctccagtgggggaacaggccaatagattgaatggcatagcccatccggcggcgcaactccagtactggcaggctgcgaatttcttctccggcaaagcggatctctccgctgtcatgctccaccaggcggttaatcattttcagggtggtggatttgccggagccagatgtgccaatcagcacgctaaaactcccttcctgaaaattgagattgagatcgttaacggctttttgtgcgccgaacagtttgctgacatggctaaattcaatcattacgtttcaccttcagcagtgcgataagcaaatcgaacagcgcgtcggtaagcaccgccagaacaattaccgggatcacccccagcaacactaaatcaatggcgctgcttagcagcccctggaaaaccagcgcaccaaaaccgcctgcgccgattaacgccgcaatcaccgccatacctacagtttgcaccatcaccacccgcaggctgcgcagaaataccggtaacgccagcggtaactgaacatgcaggaaacgctgcgccccgctcatccccatcgctctggcgctttccagcacatcgcgcgggatctggttcaaaccgactaccacgccgcgcaccagcggcagcaaggcatagagcaccagcgcaatcagtgcgggtgtcattccggttcctgctatgccgagcgtccccagccacggaaaggccgtaaccagcgcggcaagcggcgcaatcaacaggccaaagagcgccacgctaggcacggtctgaatcacattgagcagagaaaaaattgccccctgccgagcagtggaaaagtagcaccagatgcccaacggcacaccaatcactaacgcaggcagcaccgcaccaaacagcaacgtcagatgttgtgccagcgcgtcgtcaaacacatcctgacggttggcgtattctttcattagactgagatcgttaagcgtgccggagtacagcaaccacagcggaataatggcaatctgcatatgcaacaaccagcgccacagcggatgcgtggagattcggcggatggcatcgctacaggccagcaatgccagcgccgcagccagccagaaaccactgccgaggctggtacgcgccagcgcactgccattttgcgccagttgggtcgccgcctttccagctccccacaccagcaatacgaagacgaattgcgccagaatgagtgcacaaatgctgccttttttaccgggaataaaacaggccgtcagccaggcgcaaccaacgcccaccagcatccagatcgtttgcggccacagctgccagagatgacgcccctcaccgctaactaaacgattaggcgcgtaactgataaacggcagcgccgctgcgattgccgtcagcaacagcagcagcgccagaacaggattaatacggaaataagtcacgggaaattacttcgtccaccctttttgtttcaggtagtcggcagccacttttttggcatccagtccttccacagcaatgctggcattcagttgctgcaatgtttttgcatcgaggctggcgaagactggctgtagccactgtgccatttgcggatactccctcaacacgctctcacgcaccactggtgcaggcgcgtagataggttgcacaccttgcggatcgcttaaggtttgcagccccagcgccgctaccgggccgtcagtgccgtaagccattgcagcattaacgccagaggtttgctgggcagcggctttgatcgtcaccgccgtgtcgccaccagccagactcagcaactgatcctgaccgagcttaaagccataggctttttcaaacgcgggtaacgcatcggcgcgttcgataaactctgcgctggctgccagtttgaaggtgccgccctcttgcagataacgactcaggtcggcaaggctagtgagtttatttttctctgccacatcctgacgcacggcgatagtccaggtgttatttgcaggcgcgggcgtcagccagattaacttgttgtgctcgctatcgagctttttgactttctcgtaaccttgctgcgcgtttttccacgctgcatcgttttcatctttaaagaagaaagcgccattgccggtatattccggatagatatccagttcaccggaagtaatcgccccgcgcaccacaggagtcgttccgagttgcactttattcaccgtcggtacgccgtggctttccagcacctgcaaaatgatattgccgagtagcgcaccttcggtatcgattttactaccgactttaacgggggaagccgcctgtagcggcaggctcacggctgccaacataaccagactacctgcccagagctttaagagtggcatgatgctttcctcattcttttactgttgttttcagcgaattaagagaaaagcatagttgataatggcggggttagcttgagcggaaggattcagttgcagaatcagataaatacttaagaggcatattcggtccggcgtttcctgccggatgcggcgcgagcgccttatccggcctacaaagggcgcaaacgtcgcgcccttactaaagcattacagcaactcaaactcgcctttcttaacgcgtgcggaatcagtgccgataaagacattgaacttgccaggctcggcgtcatatttcatctgttgattccagaacttcagcgcctcaatatcgatcgggaagctgacagtctgagtttcgcccggtttcagggtgattttctcaaagcctttcagctgtttcacagggcgactcatggaagccgtcacatcctgcaagtacatctgcactaccgtggcaccctcgcgcttaccggtgttcgtcacctgcacgctggcagtcactttgccgtcacgcttcatggtcggcgcagaaagtttcacatcagagacggtgaaagtggtgtagctcagcccatagccgaacggatacaacgccccgttagcttcatcaaaataacggctagtgtatttgttcggcttgtcggcattatacgggcgaccggtattcagatggctgtagtacaccgggatctgcccgacagaacgcgggaaggacattggcagcttgccggacgggttgtaatcgccaaacaatacatcggcaattgcattaccgccttcagtccccgcaaaccaggtttccagaatcgcatcagcctgctgatcttctttcaccagcgccagcggacgcccgttcatcagcaccagcaccagcggtttaccggtggctttcagcgccgcaatcaagtcacgttggctttgcggaatagtgatatcggtccggctggaggcttcgtgcgccatcccctgtgcttcaccgactacagccaccaccacatcagattgtttcgccgtctgcaccgcttcatcaatcatctcttgcgggctacgcggatcgactttgaccgcttcttcatactgattcaggaaatcgataatgcctttgtcactggtaacgttcgcccctttggcatacagcactttaccgttttcaccgacggcatttttaatcccggtcagtacggtcacggattgatcggcaacaccggctgcggaccagctgcccatcacgtcacgtttactgtccgccagtggcccaaccaccgcaatggtggcgctttttttcagcggtaacgtttcgagacggtttttcagcaacaccaagctttcgcgcgccacttcacgcgcttctttacggtgcaggcggctttcggcattggtatccaccgggtcagactctttcggccccaaatggctgtatgggtcgttaaacaaccccatatcatatttaacgttcagtacatggcgggcagcatcgtccagctctgccatcgtcactttgccggatttaatcaacccaggcagatacttgctgtagtactcgtcgctcatgctcatgttgattccggatttcagcgccacgcgcaccgcatcttccgggtctgccgccgtgccatgtttaatcagctctttgattgcaccgtgatcggaaacggtgatgcctttaaagccccactggtcgcgcagaacatctttcagcagccaggaatcggaggtggctggcgtgccgttcaggctgttcagcgccaccatcaccgcgccgctgcctgcgtccagccccgctttgtacggcggcatataatcattaaacaggcgctgcggactcatatcgacggtgttgtactctttaccgccttctaccgcgccgtatgcggcaaagtgtttgacgctggtcatcacgctgtagcgatctgccgggcttttaccctgcatcgcttccaccatggttttacccattgtactggtgagatacgtatcttcgccaaaaccttcggaagcacgtccccagcgcggatcgcggctgacatcgaccatcggtgcccaggtcatattcaggccatcatctgccgcttcataagcagagacacgtccgaccgttttcactgcatcgaggttaaaagagctggccagaccgaggctaatcgggaacaccgtgcgctgaccgtgcagcacgtcgtaagcaaagaaaagaggaattttcaggcggcttaattccatcacctgatcctgcatggcgcggatatcctgacgggttacggtgttgaaaatcgccccaacctgaccgtctttgatcatctcgcggatcgcctctttcgggttatccgggccgacgctgattaagcgcagctgaccaattttctcatcaactgtcattttcttaagcagttcggtgacgaacgcatcccgcgcttcgggcgttaatggatggttgccgaataaatcatccgccagtgctggctgcagggccagactcaccgcgattcctacactacatagccatttcatatggatttttcttcctttgttgcccgacgtggcagcgaaaatggtgcaaaaaccgtagtttgccataagcatgatggagagagaaaaagaatgctcagtttattgtctgaattttcaaaatattcactcgctgaattgttatacaaggcgctattctagtttgtgatattttttcgccaccacaaggagtggaaaatgtcttccatgacaacaactgataataaagcctttttgaatgaacttgctcgtctggtgggttctagtcacctgctcaccgatcccgcaaaaacggcccgctatcgcaagggcttccgttctggtcagggcgacgcgctggctgtcgttttccctggcagtctactagaattgtggcgggtgctgaaagcctgcgtcaccgccgacaaaattattctgatgcaggccgccaatacaggcctgaccgaaggaagcacgccaaacggtaacgattatgatcgcgatgtcgttatcatcagcaccctgcgtctcgacaagctgcacgttcttggcaagggcgaacaggtgctggcctatccgggcaccacgctctatagcctggaaaaagccctcaaaccgctgggacgcgaaccgcacagtgtgattggaagtagctgtataggcgcaagcgtcatcggcggtatttgtaacaactccggcggcagcctggtgcaacgtggcccggcgtataccgaaatgagcttattcgcgcgtataaatgaagacggcaaactgacgctggtgaaccatctggggattgatctgggcgaaacgccggagcagatccttagcaagctggatgatgatcgcatcaaagatgacgatgtgcgtcacgatggtcgtcacgcccacgattatgactatgtccaccgcgttcgtgatattgaagccgacacgcccgcacgttataacgccgatcctgatcggttatttgaatcttctggttgcgccgggaagctggcggtctttgcagtacgtcttgataccttcgaagcggaaaaaaatcagcaggtgttttatatcggcaccaaccagccggaagtgctgaccgaaatccgccgtcatattctggctaacttcgaaaatctgccggttgccggggaatatatgcaccgggatatctacgatattgcggaaaaatacggcaaagacaccttcctgatgattgataagttaggcaccgacaagatgccgttcttctttaatctcaagggacgcaccgatgcgatgctggagaaagtgaaattcttccgtccgcattttactgaccgtgcgatgcaaaaattcggtcacctgttccccagccatttaccgccgcgcatgaaaaactggcgcgataaatacgagcatcatctgctgttaaaaatggcgggcgatggcgtgggcgaagccaaaagctggctggtggattatttcaaacaggccgaaggcgatttctttgtctgtacgccggaggaaggcagcaaagcgtttttacaccgtttcgccgctgcgggcgcagcaattcgttatcaggcggtgcattccgatgaagtcgaagacattctggcgttggatatcgctctgcggcgtaacgacaccgagtggtatgagcatttaccgccggagatcgacagccagctggtgcacaagctctattacggccattttatgtgctatgtcttccatcaggattacatagtgaaaaaaggcgtggatgtgcatgcgttaaaagaacagatgctggaactgctacagcagcgcggcgcgcagtaccctgccgagcataacgtcggtcatttgtataaagcaccggagacgttgcagaagttctatcgcgagaacgatccgaccaacagcatgaatccggggatcggtaaaaccagtaaacggaaaaactggcaggaagtggagtaaaaattacggatggcagagtatcgccatccgaattcacttaatcgttctgtgccgtctgccccgccgccgccatttgggcggctttttgttttttatagctcaacgctgctgccggcacaggcatcactttaccggtttcaatccaggtacgcaggcggctggcatcggcaaaatgggtatatttgccaaacgcgtccatcactaccagcgccaccggtttattattgataaccgtacgcatcaccagacaatggcccgccgcattggtaaagccggttttggttaactgaatattccagttatcgcgatacaccagatgattagtattgcggaacggcagcgtatacgtcggattagagaaggttgccatatcttcccgggtagtacttaactgcccgatcaacggatattgtttgctggcaatgagcagtttggttaagtcacgggcagtactaacgttatgcacgctcaatccggtaggttcaacaaagcgcgtgttgttcattccgaggcttttcgctttcgcattcattgccttaataaaggctttgtaaccaccgggataatggtgcgcaaggcttgccgccgcgcggttttcactagacatcagcgccagcaacagcatatctttacggctgatttcgctattcagtcgtacgcggctatagacccctttcatctccggcgtctggctgatatccacttttagtttttcatccagcggcagtcgtgcatccagcacaaccatcgcggtcattaatttgctgatagacgcaatcggacgcaccagatccgggtggttgctatagatcactttgttggtattcagatcaacaatcatcgcgctaccggaggcaatttccggttgactagcggtggtagcggctgccgttttcgcaacggcctgcggtgcaaaaggcacagccagcatcagggccaggctaaataaagaaactcgaaatttcggcatgatgagcattcagatagtggttcacgcgcacgggttgcgcaccgccggagtaaggatttactgaggctagcgacgccatcataacgagcaaaaagtgcgatcgtcaaaggagaatcgtgaggaaatgctgcattgctgacatttacgccagcaatgcaacgtcaaagaactttttagaacaaacgataaccgtagccccatagtataacggttagggcgagcagcacttccagtaccagcacgccaatcgccagcgtgctactagagaagctaaggccttcctctttgttgatattcaggaagctcggaataccaaggtaaagcaggtagccggtgtaaaacagcgccaccgtgccgaccagcgcacacaaccagaccagtggataaagcgccaccagaccgcttaaaaacagcggagttgcaacgtagcccgcgaagaccatgcagtgcgcaagactcggacgctgcggataattacgcgccatccaccagatgacccgccccatcaccgcgaccccagccagcataacgccgtaaaacaagacagccagcgccagtccggtaaaccaggataacttcaggatagtgccatcgccaaaattccagccaatctgtgtagtgccaatgaaggcgcaaatcaccggaatcgccgccatcagcaaaacgtggtgggtgtaatggtgagaaatcgtttcgttttcgcgattaatcacctgcatttcacgatcgggatgggaaaacagtccccagacatggctcataccgcccccttgttgtgagttcatgaacctgacagttcaagtataagtcagcttgtgattattttttgttcgcccatgtaattttcactgtctgatgaacgtcctttttcagcgtgaatgattcacagggtgtatgcttactggcaaccaaagggagacagactggcctatggatctcaatacacttatcagtcaatatggttatgccgcgctggtgatcggtagcctggcggaaggtgaaaccgtgactttgctgggaggcgttgcggcgcatcaggggctattaaagttcccgctggtggtactttctgtggcgcttggcggcatgattggcgaccaggtgctctatctgtgcgggcggcggtttggcggcaagctgttacgccgtttcagcaaacatcaggataaaattgagcgggcgcagaaacttatccaacgccatccgtatctgtttgtcattggtacgcgctttatgtatggctttcgggtgattggcccgacgctgattggtgccagccagctgccgccgaaaatctttctgccgctgaatattctcggcgcatttgcctgggcgttgatttttaccactattggttacgctggtggtcaggtgattgcgccgtggttgcacaatctcgaccagcatttgaagcactgggtctggttgattctggtcgtggttctggtggtgggcgtgcgctggtggctgaaacgacgcgggaagaaaaagccggatcatcaggcgtaaaaccattgccctggataaggcgttcgcgccgcatccgacatccggagtaccatgcctgatacgacgcttgtgcgtcttttcatgccgaccaaaatattacccaatgaaatatccacgcacctcactgcgttattctgggttgaactgtggattcgccaacataaagccgccatccactatcaagctctgcccggtggtgtaatttgcgccctcgctacaaagccacaccaccaggctggcaatctcatgcgttgcgccaaaacgccgcaagggaatgctaggctccgcgtcgggcttcacgtcgctgtcatccatgccattcattggcgtggcgatcgccccaggcgcgactgcgttcaccaaaatcttatgcctgaccagctccagcgccatcgctttggttaacccaccgagcgcatgtttagcggctgtgtaggcgctggcatccggcagcggcgtatgttcatgtacgctcgtaatgttgatgatgcgaccgccctgcccttgtttcaccatctgacgagccgcaatttggctgcataagaatgcaccatcgacatcaacggtaaaaatcttgcgccactcatcaaaagccatatcaagaaacggcgctttggtcattgcacccgcattattcaccagcacatcaatgcgccccagccgttgaatgagtttctccagcgccagtgccccttctggtagattgccgagatccagctgcacgatctccgcacgtacgccgtggctaactacctcacgcgcggtatcttttgccccttcttcatcactgtgccaggtaataccaatatcaaacccctgctgcgccagtaataacgcgcactctttgccgatcccgctatcggaggcggtaataatcgcaacctgtgccatcgagttctccacttaacgctgaataaacgttaagtatagaaggcgcatatcatcagcgtttgtaccccccgcccaacgcaccagtgagttgaatggaggcatccagccactgcccttgcaataacaggccattggcccgctcacgcagcgcggggattctggcttcgctgacgcgggaaccagcaatgatgcccgcgttaaagcgcgcctgcgcaagacctaccacacgcaaggcatcgcgctcaatttgcgcctgatgctggtttttctccgccagtgtctgaacctgactggctgcccgcgccacgtcattcaccgcttcaaccaccgctttgttgtagctggcgatagacaagttgctttcggcttttgcgatatcgagattggcgttaagacgaccactatcgaaaatgggtagcgtcaggcctgccgtaacgcccatttgctgcgcggaatgacggaacagatcgcttaagtgcaacgcatcctgttgcaggaaggccatcaggttgatgtcaggataaaatgccgcttttgccgcatcaatggtgcttaggctactctcaacgtaccagtgcgccgcctgcaaatctgcccgccgggccagtaaggagtaccccagttcatcaggaagctggcttgccactttcggcaacgcgaccggtttaagcttcaaactctttgtctggttatttgtaagtgcgcttaaccgtgcctcaataattttcattttccccgcgacatcgttgagctgctgccgggttttgctggcattaatatcggtttccacaccttcaacactagaagtaatcccgttctgatatagctggcgatcggtcgcgataatggtgttctgctctttttctatttgctgcaagaccgtgtttaacgccgcctgggtttgccactcccagtacaggcgggctacgctgccagccagcaattggcgggtttgctcgcgttccgccgcccgtgctttaaccgtacccaggcgggcagtaacctccgcccgattctttccccagatatcgagatgccagcccgccgttaagccaaaagtaccgttggtgtaccacgggccggtcgtacctgcggccggatcgttcagagcaaacggccccattaagccttctgcgctcattttttgccgctccatatccgccgaaaagtcgatctgcggaccatcctgagtggcaactgccttcgcctgggcttcagctagctgaatgcgctgttcagccacctgcatatccggtgcgttctgtagtgcattgttaattaaggaagactgttgattatcgtgatactccagccaccattggctgtctggccaaccattttcagcgccgtgggtaatgcggtgtcaacttgtgcagcgggcgtttgctggcttaacgcctggcgggtttcatgcataggcgcacacccggccagcatcagtaacagcggaaaacaggcgatggctggataaaaggaatcacgattcatgggggaataatcaggtaagaaaaggtgcgcggagattaccgtgtgttgcgatatattttttagtttcgcgtggcaatacatcagtggcaataaaacgacatatccagaaaaatatacactaagtgaatgatatcttccgatttatcttaatcgtttatggataacggcaaagggcttcgttttttcctatacttattcagcactcacaaataaaggaacgccaatgaaaattatactctgggctgtattgattattttcctgattgggctactggtggtgactggcgtatttaagatgatattttaaaattaattaatgtcatcaggtccgaaaataacgagaatatttcagtctctcatcctgttgcgctcctgtcatgtgcattgcttcatataatcactggcgcaaggagcgcgcagggggcggccaatcgccgccgccccctgcacccccgggctctggcgaacaaaatcgccgctgcgcggtgccctcggcttatcccttacggctaccgggtcgggcgcgaggtaacatccctgtaaaacgcgccctcagcccacatccatgtgggctgccccggccttcagggaacgcctcggcaattttgacgccaccaaacaaccgtgcggcctattgataaagagctaacacattgtcaaaaaacatcactatggttttttagagtttctcgatatcaattgcctgaatagcccttgcaatatcaggggaattattcaacacccgaacatgctgaaataattccgttgcttcatcgtattctttacgcaaataactcaaccactgtttaatccgcgcaacgtgatataacccggtatcgccctgcttttccagacgggtatatttttgcagcaaagcaaccacctccggccacggcattcgcggttcgttatattttaccacccggctcaggttgggaatattgagcgccccgcgaccaatcatcactgcgtcgcagccgctgatcgccatgcattgttgcgcgctctgccagtcccagatttcaccgttggcaatcaccggaatattcagccgctggcgaatatcgccaatcgcctgccagtcaatatgctccgcgcggtaaccctgctctttcgtccgcccatgcaccaccagctccgtagcgccagcctgttgaaccgcatcggcgatttcaaatttcttctcaccgctgtcccagcccagacgcactttcacgctgacgggcaaatgcgccggtacagcttcacgcatcgcttttgcaccctggtagatgagttcaggatctttgagtaacgtcgccccgccgccgctaccgttaaccgttttgctcgggcagccgcaattgagatccacgccccaggaacctaactccaccgcacgggcggcgttctctgccagccattgtgggaactgacctaacaactgcacgcgcaccagcgtaccagatggtgtccggctggcgttttgtagctcagggcaaatgcgatgaaagacttttaccggcagcagttgatccaccacgcggacaaactcggtgatgcacagatcgtagtcgttaacttcggtcagcaattcacgcaccagagagtcaagcactccctccatcggtgccagtaacacacgcatatcatcacccgcaaaaaaatgaggcgctatgttagcgcctatggtcagcggattaaaggtctgcaaagagggattgctgcaaactgcaatccctctctatgcttgatgtatgcctgagttcgctgcgcattgcgtaatgccggggagcgaaaaaataagcgctgatttcttaatgtgatcggtagcacgttttacgaattaattgtatgatgaatccatctcatctggggtgttgattatgagtaagacactgaacattatctggcaatatttacgcgctttcgtcctgatttatgcctgcctgtatgcaggcattttcattgcttccctgctaccggtaaccattccgggcagcatcatcgggatgctgatcctgtttgtcctgctggccttgcaaattcttccggcaaaatgggtcaatccggggtgctacgtactgattcgctatatggcgctattgtttgtgccgattagcgtaggcgtcatgcaatattttgatttgctccgcgcacagtttggcccggtagtggtttcctgtgcagtcagtacgctggtggtttttctggtggtgagctggagtagccaactggtacacggtgaacgtaaagtcgtaggtcagaaaggaagtgaagaatgatggcgaatatctggtggagtttaccgctgacattgattgtcttttttgccgcccgcaaactggcggcacggtataagtttcccttgcttaacccgttgctggtagcaatggtggtgatcattccttttttaatgctgactggcatctcttacgacagctactttaaaggtagcgaagtgctaaacgatctgctgcaaccggcggtcgtcgcgctggcctatcctttatatgagcagctacaccagatccgcgcgcgctggaaaagcatcatcaccatctgttttatcggcagcgtggttgcgatggtgacggggacttccgtggcattgttgatgggcgctagtccggaaatcgccgcgagtatcctgccgaaaagtgtcaccacgcctattgcaatggcggttggcggcagtattggcggtattccggcaatcagcgcagtttgcgtgattttcgtcggcatcctcggcgcggtatttggccatacattgcttaatgcgatgcgtattcgtaccaaagctgcgcgcggtctggcaatggggactgccagccacgccctcggtacggcgcgctgcgccgagctggattatcaggaaggtgcatttagtagcctagcgctggtgttatgcgggataattactagcctgatcgcaccgttccttttcccgattattctggcagtaatgggctaaaatttgcgatgcgtcgcgcatttttgatgtatgtttcacgcgttgcataattaatgagattcagatcacatataaagccacaacgggttcgtaaactgttatcccattacatgattatgaggcaacgccatgcatccacgttttcaaaccgcttttgcccaacttgcggataacttgcaatctgcactggaacctattctggcagacaagtacttccccgctttgttgaccggggagcaagtcagtagcctgaagagcgcaacggggctggacgaagacgcgctggcattcgcactacttccgctggcggcggcctgtgcgcgtacgccattgagcaattttaatgttggcgcaattgcgcgcggtgtgagcggaacctggtatttcggtgccaatatggaatttattggtgcgacaatgcagcaaaccgttcatgccgaacaaagcgcgatcagccacgcctggttgagtggtgaaaaagcgcttgcagccatcaccgttaactacacgccttgtggtcactgccgtcagtttatgaatgaactgaacagcggtctggatctgcgtattcatctgccgggccgcgaggcacacgcgctgcgtgactatctgccagatgcctttgggccgaaagatctggagattaaaacgctgctgatggacgaacaggatcacggctatgcgctgacgggtgatgcgctttctcaggcagcgattgcggcggcaaaccgtagccacatgccttacagtaagagcccaagcggtgtcgcgctggaatgtaaagacggtcgtattttcagtggcagctacgctgaaaacgccgcattcaacccgactctgccaccgttgcagggagcgttaattctgttgaatctcaagggttatgattacccggatatccagcgcgcggttctggcagaaaaagccgatgcgccgttgattcagtgggatgccacctccgcaacgctgaaagctctcggctgtcacagtatcgaccgagtgcttctcgcttaagcctggtgccggatgcggcgtgaacgccttgtccggcttgccagccctctcctggtgtcgaaattcccggcaaacagtttgccgtttcttgcgcaaaaccagcgggtaaagtagcctgatggaaattttccttagatcgagtctcctgcatgttaaagcgcgtgttcctcagcctgttagtcctgatcggcttgctgctgttgactgtgctcggcctcgatcgctggatgagctggaaaaccgcgccttatatctacgacgaattgcaggatctcccctaccgccaggtcggtgtggtgctcggaacagcaaaatattatcgtactggcgtaattaatcagtattatcgctaccgcattcaaggagcgattaatgcctataacagcggtaaggtaaattatctattactgagcggcgataacgcattgcaaagttataatgagccgatgaccatgcgcaaagatttaatcgctgctggtgtcgacccaagtgatattgttctcgattacgcaggctttcgtacgctggattccatcgtgcgtacacgcaaagttttcgatactaatgatttcattattatcacccaacgtttccactgtgagcgagcattatttattgcgctgcatatggggattcaggctcagtgttatgccgtaccgagtccgaaagatatgctgagtgtacgtattcgtgaatttgccgcccgtttcggtgcgctggctgacctttatatttttaaacgtgaaccgcgttttttagggccgctggtccctattccggctatgcaccaggtaccggaagatgcgcaggggtatcccgccgtcacacccgaacagttacttgaattacaaaagaaacaaggaaagtaattatggatgtacagcagttttttgtcgttgccgtttttttccttatcccgatattttgtttccgcgaagcatggaaaggctggcgcgcaggcgcgattgataaacgggttaaaaatgcaccggaaccggtgtatgtctggcgagcaaaaaatcccggactctttttcgcttatatggtggcatatatcggcttcggaattttatctatcggcatgattgtttatcttattttctatcgttaatattcccctctccagttaattattgagaataattattacttcacctgataagctgcggatatcacattcctaaccgcagctatttgtgaatcttttcacagtttaaattcccccgcacgcttagccttaatatcagtacattattatttactaaacgctcgccttaattacctatagcattaaggaagatcacatgccgcaacaaaattatctggatgaactcactccggcttttacgtctttactggcgattaaagaagcctctcgctgtttattatgtcacgacgctccctgtagtcaggcttgcccggcacagaccgatccggggaaatttattcgcagtatctactttcgtaattttaaaggcgctgccgagacaattcgcgaaaataatgccctcggtgccgtttgtgccagagtgtgcccgacggagaaattatgccaaagcggttgtacccgtgccggtgttgatgctcccattgatatcggccgcttacagcgttttgttactgattttgaacaacaaaccggaatggaaatttatcagcccggtactaaaacgctcggcaaagtcgcgattattggcgcaggtcctgccggattgcaggccagtgtgacactgacaaaccagggttatgacgtcacgatttatgagaaagaagcgcaccccggtggctggttgcgtaacggtattccgcaattccggttaccgcaaagtgtgctggatgcagagatcgcccgtattgaaaaaatgggcgtgaccattaagtgcaacaacgaagtcggtaacacactcacccttgagcagctgaaagcagaaaaccgcgcggtactggtcaccgtggggttaagtagcggttccgggctaccgctgtttgagcatagtgacgttgagattgccgtcgacttcttgcaacgtgcacgacaggcgcaaggcgatatcagcattccacaaagcgcattaattatcggcggcggtgatgtcgcgatggacgtagccagcacgctgaaagttctcggctgtcaggcggtaacttgcgtagcgcgtgaagagttagatgagtttccggcaagcgaaaaagagtttaccagcgcccgggagctgggcgttagcatcatcgatggattcacgccagtagccgtggaaggcaataaagtcacgtttaagcatgtacggttaagcggcgaactgacgatggcggcagataaaattattctcgccgtcggtcagcatgccagactagatgcctttgcggagttagagccgcagcgtaacaccatcaaaacacaaaattaccagacccgcgacccgcaagtctttgctgctggcgatattgttgagggtgacaaaaccgtggtctatgccgtgaaaaccgggaaagaagccgccgaggcgattcatcactatttagagggagcttgcagttgttaaattaatatttagagggagcttgctcatgttaacgaaagatcttagcattactttttgcggcgtgaagtttcccaacccgttctgcctctcttctagcccggtaggcaactgctatgagatgtgtgccaaagcctacgacacaggttggggcggtgtggtgtttaaaacgatcggcttttttatcgccaacgaagtcagcccgcgttttgatcatctggtgaaagaagataccggttttatcggcttcaaaaatatggagcagattgctgaacatccgttggaagagaatctggccgccctgcgtcggctgaaggaagattacccggacaaagtattgatcgctagcatcatgggggaaaatgagcagcaatgggaggagctggcgcgcctggtgcaagaagctggcgcggatatgatcgagtgtaacttctcctgtccgcaaatgacttctcatgcgatgggtagcgatgtcgggcaaagcccggagctggtagaaaaatattgtcgggcagtgaaacggggttccacgctgccaatgctggcgaagatgacgccgaatatcggtgatatgtgcgaagtggcgctggcggcgaagcgcggcggcgcagatggcattgcggcgattaacaccgttaaatccatcaccaatatcgatcttaatcagaaaatcggtatgccgatcgttaacggaaaaagcagtatttccggatattccggtaaagcggtaaaaccgatcgccctgcgcttcattcagcaaatgcgcacccatccagaactgcgcgatttcccaatcagcggtatcggcggcattgaaacctgggaggatgcggctgagtttttattgctcggcgcagcaacgttacaggtgaccaccggcatcatgcagtacgggtatcggatagtggaagatatggcaagcgggttgagccattatctcgccgatcagggatttgatagcctgcaggagatggtaggtctggcgaataacaatattgtcccggcggaagatttagaccgcagttatattgtctatccccgtatcaatcttgataaatgtgttggctgtggacgctgttatatttcctgttacgacggcggtcaccaggcgatggaatggagcgagaaaacccgcacaccgcattgtaataccgagaaatgtgtgggttgtctgctttgtggtcacgtctgcccggtgggttgtattgagctcggggaagtgaagtttaagaaaggcgagaaagaacacccggtaacgttgtaaaaccagagacgcatccggcatttggttcctgtcgccggatgcggcttgaacgccttatccggcctacaaaaccatacaaatcagtatgttgagcttattgtaggccggataaaacgcgccagcgttgcatccggcatttggctcctgttgccggatgcggcgtgaacgccttatccggcctacaaaaccacacagatcatgatgttatgtgcgtttatgaccgaatgcggaccacattcacatcatttcttacgcgcgtatttcagactatccagcgctacggcgaagataataatcgcccctttgatgatgtactgccagtatgggtttacgccgatatacgtcaggccatagttgatgacggtaaaaataattaccccggtcaccacgccaatcaccgtccccacaccgccgctgaagcttacaccgcctaccacgcacgccgcgatagcatccagctcatacataaagccgaggttgttggtggcagagccgatacgtccggcttctaacatcccgccaaaggcatagaacacgccagacaacgcgtagatcatcagcaggttcaggccgacgttgacaccagatacttttgccgcttccgggttaccgccaatggcaaaaatgttcttaccgaagcgggttttgttccacaacacccagacgaacgccaccgcaatcaacgcgtagaaggtgatgtaagagagacggaaactccccagcgcgacaaagccctgagcaaaggtagagaagccactgtcaaaaccagaaattgggctcgccccgacaaagtcgtaatagaggctgttgatgccatagacgatgatcatcgtgccgagcgtggtaatgaacggcgtcacgttgagataagcgataatcagaccgttgatcaaaccgatcaccgcaccaatggcacagacaatcagaataaccagcgcaatcggcatcgtcgccatttccgggaacactttgttggcgttatccatggactgcaataatgtcgcagccaccactgccgccagccctacctgacgaccagcagaaagatcggtcccctgggtgacaattaaccctgccacaccgagcgcgataataatacgcacgctactctgggtgagaatattacttaagttcaacagacttaaaaatgttgggtcctggaaaataataatcgccagcaaaactaaaagaacgacgtaaataccgccctctttcaggtaagtaagaaaacttttcttatttaacgcactcatgggaagcccctaatcttaaaggtgcaaagacgcaagacgcagaatttcgttttgcgttgttgtttttgtatcgacaattccggaaacgagaccattgctcatgaccagaatacggtctgttatccctaacaactcaggcatttcagaggagataataataatccccttgcctttcttcgccagttcggcaattaactgataaatttcaaacttcgccccgacatcaataccgcgcgtcggttcatcgagcattaatatttctggttgcgttagtagccagcgaccaataatcaccttttgctgattaccaccggagaggctaccaatttgcgtccgatgacccggcgtttttacccgcatgctatcaatcacccactgggtatcgcttttcatccggctgttatccagtaaaccaactttatttttgtagttgcgaatattggaaattaagctgttaaaaccaatatccagataggcataaattcccgtactgcggcgctcctcagttaccagtgcaaatccatggtttatggcttcgttggcattatggttattgatctgtttgccgtgcaacgttatggtgccagcgcttttctcgcgaataccaaataacgtctcaacaatatcggtacgtttcgcccccaccagaccggcaataccgaggatctcccctttatgcagatcaaagctgacatcgcgaatgctcggctggcgcagactcgtcaggttacgtacctcgaggatgacttcgcccggtttgttttctttgtcagggaaacgctggttaagagaacgcccaaccatcatggcgatgatcttgtccatcgtcagtcctgccagcggttcggtggcgatccactgaccgtcgcgcaatacggtaacttcatcacataactggaagatttcttccattttatggctgatataaacaataccgcagccgcgctcttttaatttacgaataatagtgaacagatgattgacctctttttcggttaagctagaagtcggttcatccataatcacaattttcgcgttataggaaaacgctttggcgatttcgatcatctgcatttggctaacggataatgtgccgacgcgcgcacgcggatcgatatcaatatccagttcgtcaaaaatcgctttggtttcgcggtacattttgtcctgatcgacaaacatgcctttggtgggatatcgccccagccacatgttatccatcacgctacgttgtaataccaggtttaactcctggtgtaccatgctaataccattttccagggcttcttttgcagaatggaaatcgatctctttaccctggaataaaatggtgccggagtctttttgataaataccaaacaggcattttaataatgtgctttttcctgcaccgttttcccccattaatgcatggatagaatgtggccggacttttaaattaacgttatcaagtgccttaacaccaggaaaggacttgttgataccgctcatttccaacaagtattccccggaggacggagtcgtactgctgaccatataattttaccttgttggccatacaataagggcgcagtaatagactgcgcccaatcagtcttatttcttgctgaattcagccaggttgtctttatctacgccaacataaggtacgcggaccactttgttgtcgattttccagttggtgccatcagccgcacctttaccatcggccaggtttttcgccagatcaaaggtcgctttcgcctggttgttagcatcgttcagtacggtgcccgccagtgcaccggatttcaccagcgccagcgcttctggcagcgcatcgacgccaaacaccggaatgctggacttgttgtgtgctttcagcgcttcaaccgcgcccattgccatcgcatcgttgttggcgataaccacttcgattttgttggcgttcgggccagacagccaggcgtccatcttatctttcgcctgagcggtgtcccacattgcggtatctaactgtaactgttcagttttgatgcctttatcgttcaattctttaatcacgtaagtggtacgtgcttctgcatccggatggcccggttcacctttcagcagtacgaactgaatctgaccgtctttgttcagatcccaaccctgattcgccgcccagtgtttagcaatcaaatcgccttgaataatgccggactctttggagtcagtgccaacgtagtaggctttgtcgtagctatccagcgccttacgagacggttctttgttgaagaaaaccaccggcacgttttgcccacgcgctttctcaatcaccgtacccgcagctgccgggtcaaccaggttgattgccagtgccttcacccctttcgccagcaatacgtcgatctgatcgttctgcttggactggtcattctgagaatcattcatcagcagctgaacatctggcgcggctttcgcatcttgctcaatagccttgcgcactacagacataaagttatcgtcgtacttatagattgttacaccaatgcgagtatcagcagcgtgtgcagcggcaccgaataacatgctggccatcacagcagacagggttaacaccttcttattcatggtatctccggtttttcttatgcagggtagtgcttgagataaatgctcggcggggcagtagagttaatgaagtgttactgaacgccgaagctcactttttaaaattcgttcttccatgcccggtaacgctccagaaaacggctttaattgttgttatgacgctgttacctcggcaaaagtgattattcactgttacatacgggttacaacgttaaaacggtgcaatcatagctatcacattgttaagatactgtgaaatcactcacagattgaaagcggttacatcgcctgatttgtactgttagtgatcgccgccgcattctggcgtgttgcgacagaatggcgacgcactaacgtcggcataaaacagtggctggcacgaggatcaatattgcctgctgccccctgcaaggccagttcggtggctaatttcgccatactagcaatgggataacgcacggtcgttaattgcgggtcggtgtaacgggcgatgggaatatcatcgaaaccgatgatactgagatgtaacggaatcgcaatgccattatcttttaatgctgtcagtgcgccagcggccatattgtcgttataagcaaatacagcggtaagttgtagattgcgccccagcagttcaaccatcgccgcctcaccgcccggcatgtccggcgtaccagcgccaatccagctttccggcggaataatatcctgctctttcaacgcactcatccagcctgctttacgcatggcgtcatcttcaatgccgtggctggaagaaagataaccaatacgttgatgaccgttattcagcaacatgcgcgtcgccattcgggcaccgctgagattatccaggcaaacgcaacgatgggcgtaccccggcacaacgcggttgattaacaccataccgggaatgttatccataaattgcgccagttcatcgtcactcaatgctttactgtgaacaatcaacgcattacaacgctggcgaattaacacctcaatggcgtgacgctctttttccgcttcatgatagctattgccgattagcacgtatttctgatgctgctgagcgaccagatccaccgcttttaccagcgcgccgaaaaacgcatcagaaacgtccatcaccaccacgccaatggtgtcgctaacctgagttgccagcgcctgggcattggcgtttggccgataatccagctcactcacggctttcattactgcttcacgcgtgtcggcactgaccagcgtgctgttattgagcacccgggaaaccgttgccacagagacgccagcctgacgcgctacatcacgaatggtgatcatattcactacctgttatgagattgcagtaaatgactgcttgctggcggctattttgtcagcactgaatacaggacttcgtgaatcgagtcacagcaatggaaacggttacagccgttttgttaacgaatgtgatccagatcgttatctacttgttttagatattgccggtccggcagcacgcaaagttaactgacgccagagccattccaccggcccctggcggaagtaacgcagccagataacagagaagaggatattcgccagccataccggaataacaaacgccagcagctccaggcggtcaaaatgcataaacaaaccgaggtggtaaaaaagcgtggtacaaatcagcgtttgcaatagatagttggtcagcgccatccgtccgacgcaggcgatcgcaagcaccagcttaaagcggctcaattgcggccagaagccataaaacaggctcgcatagccaatcgcctgaaacggcgcactcagttcccgcggcatttgaagtaagaaggcacaccagcgatacgcccagtccagctgccattgcagggcgatggcaggaaggttaatggtcaccccaatcgccaccagcacaaaaccagtacgacgatagtgacgtaagctgaactgccctttcagccagccgctgcgcatcagcgccgcaccaatgagcatcatccctgccagttgccagccatactgtgcgcccagtgccagtaaactgttgccaacaccatcggcacgattactgatcgcttcaacgccgccgtgaagcttccagtatttttcatacaaaatagcgcttgcatccggcgtccaggcgcggctggtctggctgtcggaaatcagccccaataacagcaaaacgccaagccccaccagataaagcatgacgcctgtattaaacaggctttttacgcttggcgcatcgcgcaccagccgccagcagattaagcccaccagcccgtaagccagcaaaatatcgccgtcccagaacaataaaccgtgaataaagcccaacaagactaacagcgttaaccggctctggatccagcgtctgccacggggcagcaacatttgcaggcccgcaccaaacagtagcgcaaaaagcgtgaggaatttcacctggccgatgagatcaagaaatgcccaagtccatgcatcccgcggcgtaatagcaccgtaccaggcgggattgagataagccgcctttggtagcccaaaggcgctgatgtttaatagcaggatccccagaatggcgacgccgcgaacaaaatcgagcgtgacgttgcgctccatggttcctgccttttaatcagttgtgatgacgcacagcgcgcagaaactcgtggcgcgtattctgactggatttgaacaatccaccaagagaggtcgttgtcgtggcactggttgcatcgcggatgccacgcgccttcacgcagtaatgcaccgcgtcgatgctgacagccacgttattggtgcccagcagcgtttgtagcgcaataagaatttgctgcgtcagacgttcctgcacctgcggacgctgggcaaagaactgcacaatgcggttaattttactcagaccgatcacgctatctttcgggatataggccaccgtcgctttgccatcgatggtaacaaaatggtgttcacaggtgctggtcagagtgatatcgcgcacggtgaccatttcatcgaccttcattttgttttcaatgagggtgattttcgggaaattggcgtaatccagaccggagaaaatttcatcgacatacattttagcgatgcgatgcggcgtttccatcaaactgtcatcagccaggtcgagattcagcagctgcatgatttcggtcatatgaccagcaataaggcttttgcgcgtttcgttatccatttcatgcacgggcgggcgcagcggtgtttccagtcctcgcgcaactaacgcttcatgaaccagggccgcttctttactgagacttggcatttatgatttctcctgcaggtgtgacgcctccgccctgcgtgggggcaaagttattaagctgatttacagcctgattattgtgcgtgaggcggcgcacataatccagtattcacagcgataattattgtaattgccgctgcctttcatcagcagatgttaaaacatcgttatgcaaatacggaagtgaaagttactcacagcacattgaataaacggtatgatgaagaaattgcaaacaacacaacaaggagccacgcatggaaatgctcgaagagcaccgctgttttgaaggctggcagcaacgctggcgacacgactccagtaccttaaactgcccgatgacgttcagtatctttctccctccacctcgtgatcacactccgccaccagtgctgtactggctttccggattaacctgcaatgacgagaacttcaccaccaaggcgggtgcccagcgggtagcggcggaactggggattgtactggtgatgccagacaccagcccgcgcggcgaaaaggttgccaacgacgatggctacgatttaggccagggcgcaggcttttatcttaatgccacgcaaccgccgtgggcgacgcattaccggatgtatgattatctgcgcgatgaattaccggcgctggttcagagccaatttaatgtcagcgaccgctgcgccattagcggtcacagtatgggtggtcacggtgcgctgattatggcgctgaaaaatccgggtaaatacaccagcgttagcgcctttgcgccaattgtgaatccgtgcagcgtcccgtggggaatcaaagcgtttagcagctatttaggtgaggacaaaaatgcatggctggaatgggacagttgcgcactgatgtatgccagtaacgcgcaggatgcgatcccgacgcttatcgatcagggcgataatgatcagtttcttgccgaccagttgcaacctgcggtactggcagaagccgcgcgccagaaagcgtggccgatgacgctgcgtattcagccgggatatgatcacagttactacttcatcgcctcttttatagaggatcacctgcgcttccatgcgcagtatttactgaagtgaaagtccgcccggttcgccgggcatcttctcatcagaagcgataatccactgccataaagtaacgacgtccgtcttcgttatagctgtagtcgtcacgactgagatccttgtcgccaaggttcagcacgcctgcgcgcagtttgacgtctttagtcacctgccaggccgcgccggtattccagatggtataaccgcccggtgttttagccgtcgcgctgtcggcgcgtttctgcccggtatagtgcccagaaacatagaaactccagtcttccagcgccagcggtttccagtccagcgtaccgttagcagtatggaacggcagatcggatagcggtttgttttcgccgttgctgacatcacgaccatcgttgtaggtgtagttgatgctcagtttccattcatcgttgaacggaattttcagttcggtttccacgccctgaatacgagctttgttaacgttgtagtagctaaataccggtatgcgccgtccgttagcgcccgtctcaaaaccaacaaagttttggtagcccggtgcagcgttgacgtcagacgtacggctgatgctgatacgatctttcacatcgttacggaaaacggtaacgctggattcaaccccttccagccagccttcttcacccatgtagtaaagccccagctcccaactttcgctggtttctggtttcagatccgggctacccacaatcttacatgcgccacggcaggaattgctcgtccagtcagggctaagttgcaacagagaaggtgctttaaatgccgtcgcccagccccctttcaccgttacggtgtcggtggcgttataaaccaggtaggcacgcggactccagtgttcaccgtaggtttcgtgatcgtccatacgcacgccggtcgtcagcgccagcggctcgaagatccgccattcatcttccacaaacagcgcgtactggctggcagacgttttggagctggttcccccggtcaggttcaccgcatcgctaagtttgtcgtgacgccattcaccgccaaccgtgagaaactgattaatcgccgtcagcggcaacgtgtatttgccgtcgaccgtattgctttcggaagttatcgggctgctgttgccagggtttttgttctcgactttctcaccgtagtatttcagttcgctggtgccgtaatcccaacgcccattatggctgacggagtagttctggcgttccaggcggtttttgtccaggctgtcggaatcacgatcctgacggtcgaaaccgtatccggcagtaaaatcgtgattttgattcggtgtccaggcaaattcgacattgccgtcgcggctggagaatccttcaatacgcggcgtttctccggtatcggtggtcgtactgttttgcgggtcatccttttcacgttttgccaggctgccgtaagctttcattcccagcacaccatcaattaatggtccactggtaaagaactgaccgttataggtgtcaccgcgatcgcgatgttcctgaatggtggtatcgacggtaacggtaccgctccatttctgaccgatttttttggtgatgatattcactacaccgccgagcgcatcggaaccgtacaggctgctcatcgggccacggaccacttcaatacgttcgatggaatcgaccgggatccagttcagatcgaaatcattgtggcggaagacggcattgcgggagttcacgcgtttaccgtcgacgagaatcagggtatagctgctgtccagaccacgaatactaacgcccttacggttatccccttcgttcgtcagttgtacgccaggcacttctttgaggacatccttcagattctgtaccggttttcgctgcaggtcttcctgggtaatgacgctgatactggcaggtgcatctttaagattttgttccacggaagatgcagtgacaaccatcgtttcgccatcatcatcgaccgctaacacaggccatgcacaagaaatagcggacaaacacagcccgacccgtacgaaagggttcaacctaaacattccatatctccatgaggtaactacgaaaataaaatgggttatcgctcacatcttcttcacgtccccttgcgtacggcagcatcgcggtggacttattttttatgcaggtgatcatcccagaaagccggaacagcctctgatttgtcagccttttttgattgcggcgtaacgataatgcaaacgataacaattatcaatccaaatgttaaattttatatccgcatgatttgtcagggaaatggaattgaaaaagccctctcggttgagagggcttagcaaggaagggaggaaacttatttcttatcgttctgcgggaacttcatttcgctgtagcgtacgaagtgagttcctttaatcagcttgtagccgaaccaaataatcaggaacagcgggataccaatatacgttgccgctacgccgccccagtcaatagtatctttcaggaacgcttcgtagttctggcccaaagtgataatcagacacagaatgaatgcgaagatcggccccagtgggaagaaaccactacggtacggcagatcgttaatgtcgtgtccctgcaatacgtaaccgcgacggaagcgatagtggctaatggcaatccccagccaggcgataaaacccgtcatcccggaggtgttcagcagccacaggtataccgtctggttgccaaacatggaggtcaggaagcacagaccggcaatcaccgtcgtcgcatacagcgcattacgcggcacgccaccacggctcagtttagcgaaaatgcgcggcgctttaccgtcacacgccagggtgtacagcatacgagtagacgcatacataccggagttacccgcactcagcaccgccgtcagaataactgcgttcatcaccgccgccgcagagagcagacccgcgtgctggaacaccagggtgaacggactaacgctgatgtctttaacatcgttacgcagcaggctcggatcggtgtacggaataatcaggctgataatcaggatcgcgaacacatagaacaacaggattcgccagaacacctgacgtaccgcgcgtggaatgtttttcgccggatcttcggactcgcctgcagcaataccgatcagctcggttccctggaaagagaagccgacaatcatagctacgccgatcatcgccgcaaaaccaccagcaaacggcgcttcgccgattgtccagttgctccagcccgcaggctgcgcgcctttgaagataccgataatcatcagcacgccaacgatgataaagacaataactgtcgtgactttgatcagactgaaccagtattccgcttcaccaaagccacgaacactgatgtagttcagcaggaagataacgccgaggaacaacgcactccagatccagcccggtgtatccgggaaccaccagctcatgaccagctgagctgcaaccaggtcaacggcgatagtcaccgcccagttgtaccagtagttccagcccagcgcgaagccaaagccttcttcaacatagttctgaccgtaagtggcaaagctaccggaaaccggcatatatgcagccagttcaccgagactggtcatcaggaagtaaaccatcaggccaatcagcatatagctgagcaatgccccgcccggacctgcctgagaaatcgttgcgccagaggcaacaaaaagacctgtaccgatggaaccgccaatggcaatcatcgtcaggtgacgcgcctttaattcacggcgtaagcccggcgcttctgtggttttagtttcggaaaccatacaaaaatgctatccatcttaaaaatgaggcgcgattgtagcagacgattggcaatccttccggcagaaatacacggttataagacaccttcatgatcgcccagggattataagtaaagcagccaatctcttttctggcgaatgcatgctgaaggcgctgcgtcacgaaatcgacacagcaccagcatgttcttgtacagcaacttaacgcggcacatttgcgggatcgcaatagtccagaaagcgccgtagcgcgttggaaaggtgtttttgccgatgatgtatacgccacaacgtacgcatcaggcgcggcagagggaccgcaacttcacttaatgtgcctgcctgcaattgatcttcaatcacacgtcggctcaggcaactaattcccaacccatgacgcaccgcatgtttgattgcctcggagttacctaattccatcgccatctcaaacttcggtaaatgactcagcaacagataatcgacaatctcccgcgtgccggaaccgcgttcacgcaggatccacggcgcagcggccagctgttctaaggtgaccggaccacgggccaacgggctagtcggcgcggcgaaaaccaccagctcgtcttccagccacggttcagaaatgatttcagtgctgtggcacggtccttcaataaagccaatatcaacgcggaaatccagcaccgcttgcatcacgtcctggctattcccaacgctaagttcaatcggcaactgcggataatcatggcgataacgggcgataactgcaggcagaatgtagttaccgatggtactactggcatagatacgaatcgcgccgttgtcttcgcgaaacagttgttcgatttcaaccgcctgttcaagcaatgccaacgcacgcggatagagcagccgcccgtgttcattaacaaccagtcttttccccacgcgatcaaacagttgcacgccaagctgcccttccaggtcggtcaaggctgcgctcactgcactttggctcaacgccagcatcacgctcgcctgggtggtacttccacttttcaatacttctgcaaaaacttccaactgccggagggtgatgtgcatagtcgcttaccacttataaagattaattataaatatataatcaattttatttttaaaccagttagtcgtaaccttatgcccggttaaaggagagggttatgacgaatatcaccttacagaaacaacatcgtacactgtggcattttattccggggttagccctgagtgcagttatcaccggggtcgccctgtggggtggttccattcccgcggttgcgggtgccgggtttagtgccctcaccctcgcaatcttgttggggatggttttaggcaacaccatctatccgcacatctggaaaagctgtgacggtggtgtgctgtttgccaagcaatatttattacgtctgggtatcattctttatggcttccgtctgacgttcagccaaattgccgatgtcggtatcagtgggatcatcattgacgtgttgacgctgtccagtaccttcctgctggcttgcttcctggggcagaaagtgtttggtctggataagcacaccagctggttgatcggtgccggtagcagtatctgtggtgctgccgcggtactggcgactgagccggtagtgaaagcggaagccagtaaagtaaccgtggctgttgcaaccgttgttatcttcgggaccgtcgcgattttcctctacccggcgatatatccgctgatgtctcaatggtttagtccggaaactttcggtatctacattggttctactgtgcacgaagtggcgcaggtggtggcggcaggtcatgccatcagcccggatgcggaaaacgcagcagttatttccaaaatgctgcgcgtgatgatgctggctccgttcctcatcctgctggcggcgcgtgttaaacagctgtctggggcgaacagcggcgagaaaagcaaaatcactattccgtggtttgccatcttgttcatcgtagttgccatctttaacagcttccacctgttaccgcagagcgtggtgaacatgctggtaacgctggataccttcctgctggcaatggcgatggcggcgctgggtctgaccactcacgtcagcgcgctgaaaaaagctggggcgaaacctctgctgatggcactggtactgtttgcctggctgattgttggtggtggtgcgattaactatgtgattcaaagcgtcatcgcataaaccactacatcttgctcctgttaacccgctatcattaccgttttcctccagcgggtttaacaggagtcctcgcatgaaatacattggagcgcacgttagtgctgctggcggtctggcaaatgccgcaattcgcgccgccgaaatcgacgcaaccgcgtttgccttgttcaccaaaaaccaacgtcagtggcgtgccgcaccgctcacgacgcaaaccatcgatgaattcaaagccgcctgtgaaaaatatcactacacaagcgcgcaaattcttccccacgacagttatctgattaacctcggacatccggtcactgaagctctggaaaaaagccgcgatgcctttatagatgaaatgcagcgttgcgaacagctggggctttctttgctcaacttccaccctggcagccatctgatgcagattagtgaagaggattgccttgcgcgtattgccgaatccatcaacattgcgctggataaaactcaaggtgtgacagcggtgatagaaaacaccgccggtcagggcagtaacttagggtttaaattcgaacatctcgcggcgattatcgacggcgtggaagataaatcccgcgtcggcgtctgcattgatacctgccatgctttcgctgccgggtatgatttgcgtactccagccgaatgcgagaaaacattcgcggattttgcccgtactgtcggctttaagtatctgcgcgggatgcaccttaacgatgcgaaaagcacctttggcagccgcgttgaccgccatcatagcctcggtgaaggcaatatcggtcatgatgcgttccgctggatcatgcaggacgaccgtttcgacggcattccgctgatcctcgaaaccatcaacccggatatctgggcagaagagatcgcctggctgaaagcgcaacaaactgaaaaagcggtagcctgaagatgaataaccgggaaaaggagatccttgcaattttacggcgtaacccgctgattcagcagaacgaaattgcggacatgctgcaaatcagccgtagccgcgttgcggcgcatattatggatttaatgcgcaaaggccggattaaaggcaaaggttacattctcaccgagcaggaatactgcgtagtggtggggacaatcaatatggatattcgcgggatggcggatatccgttacccgcaaagcgcttctcatcccggtacaattcattgcagtgcgggcggcgtgggacgcaacatcgcccacaatctggcgctgttaggccgtgacgtccatttgcttagtgtgattggcgatgacttttatggcgaaatgctcctggaagaaacgcgccgtgccggcgtgaatgtctccggctgcgttcgtttgcatggtcaaagcacaagcacgtatctggcaattgccaatcgagacgatcaaaccgtgctggcgattaacgatacccatctgctggaacagttgacaccgcaactactgaacgggagccgcgatttacttcgtcatgcgggcgtggtactggctgattgcaacctgacagccgaggcgctggaatgggtctttaccctcgctgatgaaatcccggtgtttgtcgataccgttagtgaattcaaagcgggcaaaatcaaacactggctggcgcatattcacaccctgaaacccactttaccggagctggaaattttatggggacaggcgatcaccagcgatgctgaccgtaataccgcagtgaatgcattgcatcagcaaggtgttcagcaactgtttgtttatttgcccgatgagagtgtttattgcagcgaaaaggatggagaacaatttttgctgaccgcgccagcgcatacgacagtagacagttttggtgctgacgatggttttatggcgggcctggtatatagctttcttgaaggatacagtttccgcgacagcgcccgttttgcggtagcctgcgcggcaattagccgcgccagcggcagcttaaacaaccctaccctgtctgccgataacgcgcttagtttagtgccaatggtgtaacaatgttgccggatgcgacgcttaacgcgtcttatccggcctacaaatcaggcaatttcagcaagtaaatgtaggcctgataagcttgcgcatcaggcaatgacactcaagctaaaccaataaagaacccggcaatggtcgcactcatcaagttggaaagcgtcgccgccgccagcgcccgtaaaccaagctgggcgatttccggcgcacggtgtggcgcaaccgcagaaaacgcccccaccaccaccccgatagaaccaaagttagcgaaaccgcacaacgcgaaggaaataatcgccacagttttagcatcgagagtgccagccgtttgcagatagggactgaaattgagataagcgacaaattcatttattgccagtttctgtccaatcaaactcccggcaagattcgcatcactccagtccacacccatcacccacgccagtggagccagcaggtaacctaaaatggactccaggctggcatgttcaaaaccaaaccagccaccaacgccgccgataataccgttaatcaacgcaattattgcaacaaatgccatcaccactgttgccacacctgcggcgattttcagcccggtcattgcccctgtcgcagcggcttcaataatgctttttggcggtgtttcggtgaaagagaggttattaaaggaaacctggctagattccgttgccgggcttaacaggcgggcaaacaagatcccgccagggatcgccattaaacttgccgccagcagatattccacaggcacgcccagtgcggcgtaaccaatcattgtgctaccagcaatgctggccatgccactacaaatcgctgtaaataattcattgcgattcagacgatcgataaagggtttgacgattgccggaatttcgttttgcccgaggaaaatggtggtgaccgcgacgaaactctcgatcttgctgatatttaatgctttctggaagataccgccgagaattcgaattaaaatccccatcacaccgatgtagtagagaatactcaccagcgcggtgacgaagataattgccggtaacaccctgaaaccaaagataaatcctgcaccatcaaataaggtatccattttcggtccgaccagagaaccgaagataaatgcgctacccgcgtcgctgtacgccatcactttatgcacgccaaaagcgactttttcagcgacccaacgccctggcggtaaccaaagcataatgccgccaatcacgacctgtaacactaacgccgcgccaacggtacgcaggctgatcttcttcttgtttacactcagtaaaaacgcaatcgtcagcaataccaccattcccagaacacttctcatgacatccatagtgattatctcttcatgtcatattgggcgacggctttctgcccatcagaaatagccaggcctgcatcttgcgataccggcccggcttgttatcaacacttaatgggttttgatgtagccgcgcacgcactcttcgactaatccccagaaccagtctgtatcaatagtgatgccgactttggtattggcgggcttgccaagaacgcccagctcgtcgcagacggtacgcccatagcaagggccactgttgacgtccacttcgacgtacatctcctgggttttaatgccatcagggttaatcagataaccgatgcaggtggcgtcgtgcaccgggccgccagcaaggccgtagttttcgaactgcgttttgagagtgaagttcatgatgtcgctgaacagctctccggcggggccgcctgccctttccatccgagcaatcacgtccggggtgcaaacggtctggttggtgagatcgaggcccatcatcactaatggaacgccggaggtgaacactacgcgtgcggcttccgggtcggcaaagatgttgaactcggcagatggcgtgaagttgcctgtaccgtaagcgccgcccattagcacaatttcacggattttgggcaggatcgcgggttgcatacgcattgccaccgcgatattactaagcggaccaaccggcaccagagtgatatcgccatcgcttgccatcagggtatcaatgatatatttcaccgcatgagtgctttctgcctggcgggtcagcggctcgaataccgggccatccagtccggtttcaccgtgaatattatcggcaacgatttgttgacgcataatgggctgcggcatccccgcataaaccggaacattaatctccagtttctggcaaacattcaggccattaattaatgttttatcaagcgtctgattacccgctacaatagtgatgcctaataaatctattgccggatgtttcgccgccatcattatagcaatagcatcatcatgacccggatcacaatccagaataatttttctcttttccattgtttatttcctctgtttccagttgcgttattttttctacagcaaagaaaattcgaccgggccgatgattgaatcttaacaacagcgtacgtatgctaaatatgagaaatctcatagcggataaacatcgtgaaagaaatccacaataatgatcttaagcagcaattgatgagtgaatccgcgtttaaggattgctttttaacggatgttagtgccgatacgcggctgtttcattttttagcgcgtgactacattgtgcaggaagggcaacagccgtcctggctgttttacctgacgcgaggccgcgccaggctttacgccacgctagctaatggtcgcgtgagcctgatcgatttctttgccgccccctgttttattggcgagattgagttaatcgataaagaccatgaaccgcgtgcggtgcaggctattgaagagtgttggtgccttgcgctccctatgaaacattaccgtccgctgttattaaacgacacgctatttttacgaaaactctgcgtcaccttaagtcataaaaattatcgtaatattgtttctttaactcagaatcaaagttttccgttagtgaatcgcctggcagcatttatattactcagccaggaaggtgatctttatcacgaaaagcatacgcaagcggcagagtatttaggcgtttcttatcgacatcttttatatgttctcgcgcagttcattcacgacggtttattaattaaaagcaagaaagggtatctcattaaaaacagaaagcagttgagtggactggcgctggagatggacccggagaataaattctccgggatgatgcagtaaaaattattttcaatagcgcgattgccggatgcaacgcttaatacgttttatccggtctacaaatcgagcattacgccagaccaataaagaacccggcaatagtcgcactcatcaggttggaaagcgttgctgctgccagcgcccgtaaaccaagctgggcgatttccggcgcgcgttttgggctaatagcgctaaatgcgccaacgacaacaccgatagaaccaaagttagcaaaaccacaaagcgcaaaggagataatcgcaatggttttcacttccagcgtgccgcccgtttgcaggtatggggagaaactcaggtaagcgacgaattcgttaatcgccagtttctgcccaatcaggctacccgcaagattggcatcactccagtccacacccatgatccacgccagcggtgccagcacatagccaaaaatactttccagagaggcattggcgaaaccaaaccagccgccaattccgccgataatgccgttgatcagcgcaataattgcgacaaacgccattaccaccgtcgccacaccagcggcgatttttagcccggtcatcgcaccgctcgccgccgcttcgataaagctttttggcggcgtttcgctgaagctcagattttcaaatgtgacctggctaggctcggttgccgggctaagaatacgtgcaaacaaaatcccgccagggatcgccatcaggcttgccgctaacaggtagtcaattggtacgcccattccggcataaccaatcatcatgctaccagcaatggacgccatcccgctacaaattgcggtaaacaactcgttgcgattcatgcgatcgataaacggtttaacgatcgccgggatctcattttgcccgaggaaaatagtagtaaccgcaacaaaagattcgattttgctgatgttgagggctttctggaaaatgctgccaaggatgcgaatcagcagccccatcacgccaatgtagtacagcagactgatgagcgcagtaacgaaaataatcgccggaagtacgcgaaaggcgaagataaaacccgcaccgtcaaacaggacatccattttcggcccaaccaggctaccaaaaatgaaggcgctaccggcatcactgtaagacatcactttatgaacgcctaatgccgcctgttctactgcccattttcccggtgggaagtagagcatgatgccaccaatagcgatttgcagcagcagtgcggctccaaccgtgcgcaaactgatgctctttttattcacactcaacagaaatgctattgccagtaacaccaccatccccacaacacttctcattatatccataatgattttcccttcatgccggtaaacccggcgtcagcgccaggttttggtatgcttgatgagtacgggcgacggctttctgcccgtcagaaattaacccgcgagacgctgatattctttggcaatttcgctcgccagaatggcgttgttgaacaccagctggatgttggatttcaggctgtcaccgccggtcagttcagcaacgcgcgccagcaggaatggcgtactttctttaccaatgactccctgagcttcagcttcagctaccgcctgatcgatcgccgcattgatagtgtgttccggcatagcaaactgttccgggatcgggttcgctaccacgaggccaccgttcagaccgctttgccatttcaccaccattgcacgggcaatttcgctggcgctgtcgagacgaatgctgacgtcaaacgggctggtgcggcagaaaaacgcaggcagcgctttagtctgatagccaattaacggcacaccgaaggtttctaaatactcagtggttaatcctaaatcgagaatagatttcgccccggcacaaacaacggtgacattagtatttgccagttcttgcaaatcggcagaaatatcgaaggtatgttccgccccgcgatgcacaccaccaattcccccggtggcaaatactttaattccggcaagcgccgcaataatcatcgtactagccacagtggttgcgccattttttccggcggcaacaacaaaaggtaaatcgcgacgactaactttggtcacgttatgcccttcacgacccagtaattcaatttcttctttgcttaaccccactttcatcacgccgccaataatggcgatcgtggcaggtacagcgccctgtttacgaatagtttcttcaacttcaattgcggtctgggcattttgtgggaacggcatcccgtgagaaataatggtgctttccagcgccacaaccggttttttgttttttaaagcgtcctgcacttccggggaaatttgtaataattcaggggaaatttttaattcagacattctgcgttctccactaagcttataacgttggcaatgcttaaatcggggttattggtgtattcacaggagagcgccatactgctacatccctgtgcgaaacgaacagattcggcaaacggcattccgtctacccaacagctagcaagtcccgccatcatggcatcgcccgctccggtaacattaataacattggttttgatcggcgcagaccagccactttcaccgctgatatcgctgtaataaacgccgtcgccgcccatgctcaataccagtcggttcaggccatgttgatggaaccaggcagcaacttttgccacatcttcacgcccactcagcgcaatcccactcagggtttccgcttcaaggcggtttggcttgagagtgtggatctgatttagacggtcgcgcactttgacacatttccatgcgctaaccggatcgacaaatacgggtacgttggcggcattatccagaatccatgccagtgcctcttcactgatattacagtccgcgacaatgacctttgccctctgaataaattcaccgtgctgtgcgagatattcagctgtaatagcgttgctaatattcatgtcatttatagcaaccagcatttcaccggtattatcgagtaaacttaaataactgctcgtattttctcccggcacaatcaggcatttatcgacataaacgccagattgattggtttgcgttagcaggctttgaccataaaaatcactgcctacggcgctcagtagccaggctttgttacccagcaacgccaggttttgtgcaatattgcgccctactccaccaggcgtaaattttattttacctggattactatccgcataatttaaactttcatgactatatccggcgacatcaatattcgcgctacctataattacgacataatccttttcgcgcatagcacgtcctctggtaaaaaattaccaaccctgtcaatccacaagaatatagatactgcaaagacggtttaaacatgtgttcatatttaaacatgtgctcatagtatgcatgttttacgtaaagtaaattaccgccagagaggcaaaatgggcagatttgagcaggctcacaaaatgcgattaaatgcctgaattacaaaagcgaggaatttgtgacgggatgcacagaacagaacaataaaaaagggcagaaaataatctgcccttgaggaaataacctgagtgtttgatgaacgtttgaagtttctactgaaagataaaaccatttaaattcataaaattacattcacaaaccggtcattctctttgcgctcatcaaatgttacaggacaggaaatttctgccctgtaacacaccttttattacgctgctttcgctactgcgtccacttccggacgtttcaggaaggcataggccaaacccgccaccagcgtaccggcaataattgctaccaggtaacccaataccggcgtaatagcgccagggatcagcagaacaaacagaccaccgtgcggtgccatcagtttcgcaccaatcgccatactgattgcgccagtcagcgccccacccacgatacagcacggcagcacacgcatcggatcacgagcagcaaacggaattgcaccttcgctaatgaagcacagtcccaataccagagcggctttgccaccttcctgctgcgctttgtcgaatttgcgacgcgccaccattgttgccagacccattgccagcggtggcaccatacctgccgccataatcgccgccatcgggccataggtttgagtactcagcagacccacaccgaatgcgtacgctgctttgtttaccggaccgcccatgtcagtacacatcatgccaccgaggatcgcccccagcagaaccgcattcgcagtccccatggtctgcagccagtgagtcagcccttcgagaatgccagcaactggtttaccgatcaggtagatcatcgccagaccgaccaccagactggaaattagcggaatgatcaggatcggtttcagcgcctccatactctgtggcagtttcaattgcgtactgattaacttcgcaatgtaaccagccaggaagcccgcaataataccaccaatgaagccagaaccggtgctgaccgccagcataccgccaatcagacccggagtgaggcccggacgatcggcaatggaaaaggcaatataacctgccagtaccggcaccatcagcgcaaaggcactaccaccaccaatctgcatcagcgccgcagccaacgtacccggctctttaaacgcttcgataccaaaagcaaaagaaagcgcgatacacagaccacctgcaacgaccatcggcagcatgtaagaaacgcccgtcagcaagtgacggtatgcgcctgcactctctttcttactttcagtggtcgccgtttgagctttgcccgccggttcatacggcgttgcttcagcaaccgctttatccagttcctgcgcggttttcttcagcgccagaccggtagaggtacgatacatcggtttaccagcaaatttcgccagatccacttcgatatctgccgccacaatcaccagatccgctgctgcgacttcttcgggagtgattgcattacccgcgccaacagaaccacgggtttcaactttcacccaccagccacgttttttcgcttcggtttcaatggcttcagccgccataaaggtgtgtgctacgccagtcgggcaagcagtcaccgcaactacgcgtttcggaccgctggcggcaactggtgctgtcgcagcgaccggcgcagtgtaaggtttcgcatggcctttggcttcactcaggaacagctcagggtgcgcaactgcccgggaaatatcgcccagccagacatttttaccgttcagcgcgctgtcgttcgggatggaatcaccgagaacaatcgccatttcagcgtcgttcggattgtcgatgatttccagttttgcttttcgcgccgccgcgcccagcagggtcttcgccatataggcgcgtgcctgaccgagattagcgtcaataatcagcagcgttttcattatgcctctcctgctgtcagttaaaaggttgtaagtcgacgcgcgccatcattgcggccaactgcggacgatcggtaatacccacattgctttgacttaccgccagggctgcaacagctgtcgccagacgcagtgtgtgttcactggattcacgcatcagcaagccataaatcaggccaccaaccatagaatcccctgcgccaacggtgcttacgacatcgacactcggtggtttggcgatccattcgccggaggcattaacccaaagcgcgccttcggcacccagactaataacaacatgcgcgatgccttgttcacgtagcgcatgtgcagcttcaatcacatctttcatttcaggcagtttacggcctgcccagatttccagctcgcggcggttaggtttcaccagccacggtgccgctttcaaacctgctactaacgcttcacggctactatcaaagataatgcaaggacactgactacgcaggcgagtcatccagtcggtgaacgcttccgggctgacgccactcggtaagcttccgctgacacagaccatatcgaactgaccgagccagctcagagaatcagtcacaaagcgttcccagtcggcgggggtgacttcaaaaccgctgaagttgaagtcggtcacttcgccgtctttttccgtcagcttaacgttaattcgggtgcgcccctgtacaacctggaaacggttggcaatgcccagctcgctgaacagttgctgaaaaccatcctgattgtctttacccaggaagccgccaacggtgacatcaattcccaggtcttttaatactttggccacgttgatgcctttacccgccgcatgcagaccggtggttttcaccaggttcacttcgccgcgttcaatttccgggcagaaaccaacaaggtcataagccggattaagggtgatagtagcaacacgtctgctcattatgcgccctccccaagaccagcagcgatagcgtcgccgattgctttcagcgcctgttcagcatctgcaccctgggcggtaaagcgtaggcgatgacctttcttaacgccaagtgccacaactttcatcagactacgtccgtttgccggtttgccggtaccatcaaggtttgtcacggtaatatcactgttaaattgtttaatggtattgaccagcatggtacctggacgagcatgcaggccgtgttcattgcgcaccacaaactccgcgcttaacacgtcgtcggtcggcgcatcatcgctggtcagcagcgccagcaacgttgccgcatccgctttcagcaagcggtcagctttattgtcgagcaataaatcagcgagacgcttaagaaccgcgatgggctgatcgtcattcatcgccacactcaccagcatggctgccgtttcgccgtccacatcaaaagcatttgccgcacggcttaccgcaatcgcgctacgcagattgccttcggcgctatcgctcagccagataccctgtccgagattcagcggttgttcattgatggctttggtgacgaaagtggcgtcaactgcccccgcctctttcagacgcgcagcgttcagcgcctgaagagtcagcagatcgctggcgacgatatccagtgtcagcatttcgttgtcgagcttcagctgctcactctgcttttcgcccatcagtaatgcgcgaagttcttctgctgttgttgcactcttcagttgttcagcaacggaatcatcgctcagtacgtgggtcagctggcgtagcaggcccagatgttcatcgctgctggcagcaataccgattgccacgtacgctacctgaccgtcaccccaggtgacgccttccgggaactgaaatacctgaacgccggttttcagcacctgatcgcgggtgtcggtagtgccgtgtggaatagcaataccattgccgaggaacgtactggtttgctgttcgcgcgccagcatgccattgacgtagccttctgctacattaccggcctgcaccagcgccgcagcgacctggcgaatcgcctcttctttgtctccggccttttcgcccggatggatgtcctgtacggataactggaacatagttctcctctcttgctgaattgaaacgattcagcctctatgagaaaaaaagcgccaacctggcttagggttaaagacaagatcgcgctgaaacgtttcaagaaagcataatacttctgtttcagcacgcaaggaaagccgtaaagttatgagcaaaagtttgatgtgctgcacaattttttgccatttttcctaattgctgatgggaaaatccgttatcagcaatttcatttcagcagcgtcagcagccaatcagcaacagtgaaatggcattttgactattcgtggcgcttttgatttcgctgtctgtttattttctgacaagcagcgtaaactccgcgtcttcctcttccagtgatcgaccagcatgcataactcccccgcagtctccagcgcgaaaagctttgacctgaccagcacggcgtttttaatcgttgcctttctcaccggtattgcgggcgctctgcaaaccccgacactcagtatttttcttaccgatgaagtacatgcccgtccggcgatggtgggattcttctttaccggcagcgctgtcattgggattctggtaagtcagtttctcgccgggcgctctgataagcgcggcgatcgcaaaagcctgattgtcttttgctgcctgttaggcgtgctggcctgcaccctttttgcctggaatcgcaactactttgttttgctattcgttggcgtctttcttagcagctttggcagcaccgctaacccgcaaatgtttgcccttgcccgtgaacatgccgacaaaaccggacgtgaggcggtgatgttcagctcttttttacgcgctcaggttagtctggcatgggtcattggcccaccgctggcttatgccttagcgatgggtttcagctttacggtaatgtatctgagcgcagcggtagcgtttattgtttgcggtgtgatggtgtggctgtttttaccgagcatgcgaaaagagcttccgctggcgaccggcacgatcgaagcgccgcgccgtaaccgtcgcgatacgctgctgctgtttgtcatttgtacattgatgtggggcagcaacagcctgtacatcatcaacatgccgctatttattatcaacgaactgcatcttcccgagaaactggccggtgtgatgatggggaccgccgccgggctggaaatcccgacgatgttgattgccggatatttcgccaaacgtctgggtaagcgtttcttaatgcgcgttgctgccgtgggtggcgtctgtttttacgcaggaatgctgatggcgcatagtcctgtcattctgttgggcttgcagctgctaaatgctatttttattggcattctgggcggcatcgggatgctctattttcaggatctgatgcccggtcaggcgggtagtgccaccacgctctataccaacactagccgcgtgggctggatcatcgcaggaagtgtggcgggcatcgtcgccgagatctggaattatcacgctgtgttctggtttgcgatggtgatgattatcgccactctgttttgcttactgcggattaaagatgtttaaggcgcggtcagcatttccagatcgataagccaggtcatggcctgctgacggctgttaccgcacatttcagcgctggcttgtaagcctgcacagactttcggtcgcagtgggctggtgaaaattttacagcgttgctgttcatcaagctgaatgcagggcgtattggcgggcttgccatctggcataccgggaatagggctggaaatactaggggcagtgcaacacgccccgcaacccggacggcattccatacgttgttctcttaaggttaaccaccggattgatgagcgcgcacagtaccaccttttttgcaccagcaaaagtgcgaataccacttgcccgaaaggcccgtcgcgagtactttgtcgcgatatttttgacattttcgactacaggaatttttcgatgccaagagcgaacgaaattaaaaaaggtatggtactgaattacaacggcaaactgctgctggttaaggatattgatattcagagccccactgcccgcggtgccgctacgctgtacaaaatgcgtttttctgatgtccgtaccgggctgaaagtagaagagcgtttcaaaggtgatgatatcgttgacaccgtgacgctgacccgccgttacgttgacttctcctatgtcgatggcaacgaatatgtctttatggataaagaagactataccccgtataccttcaccaaagatcagattgaagaagagttgctgtttatgccagagggcggcatgccggacatgcaggtgctgacctgggacggtcaactgctggcgcttgagctgccgcagaccgttgatctggaaatcgttgaaaccgcaccaggcatcaaaggggcatctgccagcgcccgtaacaaaccggcgacattgagcactggtctggtgattcaggtaccagaatacttaagcccgggcgaaaaaattcgtatccatatcgaagaacgccgttatatggggcgtgctgactaacttcagccgcatgcagaaaagggatagctcaggctgtcccttttttaatttattataccaatcttctattttgcgcttcctgaacaccttacgccctcaattttcactcgttgattgatcgccctcacacttcatcgcattaacaatccagaccaatttcaattgctgtcatataactttacactgtcgttgttaattaatcgttactaagacgtgactcctatgaatacaatcgcctccgttacgctcccgcatcatgtacacgctccacgctatgatcgccagcagttgcaaagtcgtatcgttcattttggctttggagcctttcaccgcgctcatcaggcgttactgaccgatcgtgtgctgaatgcccagggcggcgactgggggatctgtgaaatcagcttgttcagcggtgatcaactgatgagccagctccgcgcacagaaccatttatataccgtgctggagaaaggtgcggacggcaatcaggtgataattgtcggtgccgttcacgaatgccttaatgcaaaactggattccttagcggcaattattgagaaattttgcgagccacaggtggcaattgtttccctgacgattaccgaaaaaggctattgtattgacccggccaccggtgcactcgacaccagtaatccgcggattattcacgatctacaaacccctgaagaacctcactccgcaccgggtattctcgtcgaagcactgaaacgccgccgtgagcgcggccttacaccgtttaccgtgctctcctgcgacaatattcccgacaatggtcatgtggtgaaaaacgcggtgctgggaatggcagaaaaacgtagcccagaactcgccgggtggataaaagagcacgtcagttttccgggaaccatggtcgaccgcattgttccggctgcaaccgacgaaagtctggtggaaatcagccagcatctgggggtgaatgatccctgcgcgattagctgcgaaccgtttatccagtgggtggtggaagataacttcgtcgctgggcgtcctgcctgggaagtcgcaggtgtacaaatggtgaatgatgtcctgccatgggaagagatgaaactgcggatgcttaatggcagccactcttttctcgcttatctgggttacctcagtggattcgcccatatcagtgattgcatgcaggatcgcgcatttcgccatgccgccagaacattaatgctggatgagcaagcgccgacactgcaaattaaagatgtcgatttaacacaatatgcggataagttaattgcacgttttgctaatccggcgctgaaacataagacctggcaaatcgcgatggatggcagccagaaattaccgcaacgcatgctggcaggtattcgcatacatcaggggcgcgaaacggactggagcttgctggcattaggcgttgcaggctggatgcgttacgtcagcggcgttgatgatgccggaaatgccattgatgttcgcgatccgcttagcgataaaattcgcgaacttgttgcgggcagcagcagtgaacaacgcgtaaccgccctgctttccctgcgtgaagttttcggtgatgatctgccagataacccgcattttgtgcaggccatcgaacaagcctggcaacaaatcgtacaattcggcgcacatcaggcgctattaaacaccctcaaaatttaacgatttctgcggttaaagcggatgaagctcaccttcgtccgctctccccttctcttttctgccttttttagccaggattaacgctcagttaacttaccagagtattgcggagccgttgtgaccaggaccaacctcatcaccggttttctcggcagcgggaaaaccacgagcattcttcatctgttagcccataaagatcccaacgaaaaatgggcggtactggttaatgaatttggggaagtcggaattgatggtgctttgctcgccgatagcggcgcattgctgaaagagatccccggcggctgcatgtgctgcgttaatggtttacccatgcaggtagggttgaataccttactgcgtcagggaaaaccagaccgcttgttgatagagccgaccgggctgggccatccgaaacagatcctcgatctgttaaccgcaccagtctatgaaccgtggatagatctgcgcgccaccttgtgcattctcgatccgcgcttgctgctggacgaaaaaagcgccagcaatgaaaacttccgtgaccagctggctgccgcagacatcattgtcgccaataaatccgaccgtacgacgcccgaaagtgagcaagcgctacagcgttggtggcagcaaaatggtggcgatcgacaattaattcacagtgagcatgggaaagttgacggtcatcttctggatttgccgcgtcgcaatttagccgagttgcccgccagcgccgcgcattctcatcagcatgtcgtgaaaaaagggttagcagcgttaagcctgccagagcatcaacgctggcgtcgcagtctgaacagcgggcaaggatatcaggcctgcggctggatattcgacgctgatacggtattcgacaccattggcattctggaatgggcgcgacttgcaccggtggaacgcgtcaaaggcgtgctgcgtattcccgaagggctggtgcgaatcaaccgtcagggcgatgacctgcacattgaaacgcaaaacgttgcgccaccggacagccgtattgagctgatttccagcagcgaagctgactggaatgccttgcagagcgcgctgttgaagcttcgtttagcgactaccgcgtaaggttgcctgcgtttttcagtaagataattagagaaaatatgattaaaaatttgccgcaaatagtgttgttgaatattgtcggcctcgcgctgtttctttcctggtatatccccgttaatcatggattctggttgccgattgatgcggatattttttatttctttaatcagaaactggtcgaaagtaaggcctttttgtggctggttgcattgaccaacaatcgcgccttcgacggttgtagtctgctggcgatgggtatgttgatgctgagtttctggctgaaagaaaacgcccctggcagacgacgtatcgtgattattggtctggtcatgctattaactgcagtggtattaaaccagctgggtcaggcattaattcctgtaaaacgggccagcccaacattgacttttaccgatattaaccgcgtcagcgaactgctctctgttcccacgaaagatgccagtcgagatagctttcccggcgatcacggcatgatgctgcttatttttagcgcattcatgtggcgttatttcggcaaagttgcaggccttatcgcccttattatttttgtggtttttgcatttcccagagtaatgattggcgcacactggtttactgacatcattgtcggtagcatgaccgtgatattgatcggtttgccctgggtgttgctgacgccattaagtgatcgattaatcaccttttttgacaaaagtctaccaggaaaaaacaaacatttccaaaacaaataactcacagtaattaacatcatcagggttatttttatagtgaggataatcctgatgatgcgcaccgtgctttcatctatcgaacgcaaaaatcattctctaagtaaatgaatggattgcatgcgtttcactcaattgtactttaattgaccaaccccgcttattaactttctgtatcactttttcttataaaaaatcatgtaaaaccgctcgccaagaccgcaccaatcgggtaatctcgaactcgttttgcctcggcggtagattatcctcacagcatataattttgtgcgttagtccacagatttggccttaaggaattgtttcaacatgcccaggtaattagtctcgtgtcgcttggcatttttttataacgatatttgtcgttaaggacttcaagggaaaacaaacaacatggtcaaatctcaaccgattttgagatatatcttgcgcgggattcccgcgattgcagtagcggttctgctttctgcatgtagtgcaaataacaccgcaaagaatatgcatcctgagacacgtgcagtgggtagtgaaacaagtagtctgcaagcttctcaggatgaatttgaaaacctggttcgtaatgtcgacgtaaaaagccgaattatggatcagtatgctgactggaaaggcgtacgttatcgtctgggcggcagcactaaaaaaggtatcgattgttctggtttcgtacagcgtacattccgtgagcaatttggcttagaacttccgcgtagcacttacgaacagcaggaaatgggtaaatctgtttcccgcagtaatttgcgtacgggtgatttagttctgttccgtgccggtagtacgggacgccatgtcggtatttatatcggcaacaatcagtttgtccatgcttccaccagcagtggtgttattatttccagcatgaatgaaccgtactggaagaagcgttacaacgaagcacgccgggttctcagccgcagctaataaaccgtttggatgcaatcccttggctatcctgacgagttaactgaaagcactgcttaggcagtgcttttttgttttcattcatcagagaaaatgatgtttccgcgtcttgatccaggctatagtccggtcattgttatcttttaaatgttgtcgtaatttcaggaaattaacggaatcatgttcatacgcgctcccaattttggacgtaagctcctgcttacctgcattgttgcaggcgtaatgattgcgatactggtgagttgccttcagtttttagtggcctggcataagcacgaagtcaaatacgacacactgattaccgacgtacaaaagtatctcgatacctattttgccgacctgaaatccactactgaccggctccagccgctgaccttagatacctgccagcaagctaaccccgaactgaccgcccgcgcagcgtttagcatgaatgtccgaacgtttgtgctggtgaaagataaaaaaacattctgtagttctgcgaccggtgagatggacattccactcaatgaattgattccggcgctcgacattaataaaaacgtcgatatggcgatcttacccggcacgccgatggtgccgaacaaacccgcaatcgtcatctggtatcgcaaccctttgctgaaaaatagcggcgtctttgccgctctgaatctcaacctgacgcctagtctcttttatagtagtcggcaggaagattacgatggcgtcgccctcattattggcaatactgcgctatctaccttttctagtcgtttgatgaacgttaacgaattaaccgacatgccagtccgtgaaactaaaattgcgggcattcctctgaccgttcggctttatgcagatgactggacatggaacgatgtgtggtacgcatttttactgggcggcatgagtggaactgtcgttggcctgctctgctattacctgatgagcgtacgtatgcgccccggcagagaaatcatgaccgccatcaagcgcgaacaattttacgtggcgtatcaaccggtggtggatacacaagctttgcgagtaacgggcctggaagtactgctacgctggcggcatcctgtcgcgggagaaattcccccggatgccttcattaactttgccgaaagccaaaagatgattgtgccgctgactcagcacctgtttgagttaattgcccgcgatgccgcagaattagaaaaagtgctgccggtaggcgtcaaatttggtattaacattgcgccggaccatctgcacagcgaaagctttaaagcagatatccagaaactgctcacttccctgcccgcacaccatttccagattgtgctggaaattaccgagcgcgatatgttgaaagagcaagaagccacacaactcttcgcctggctgcacagcgtcggcgtagaaattgctattgatgacttcggcaccgggcacagcgcgcttatctatcttgagcgttttacgctcgattatctgaaaattgaccgtggatttatcaacgccatcggtacggaaacgatcacttcccccgtacttgacgcggtgctgacgctggcgaaacgcctcaatatgctgacggttgctgaaggggtcgaaacgccggaacaggcgcgatggctaagcgaacgcggcgttaatttcatgcaaggctactggattagccgcccgttaccgctggacgattttgttcgctggctaaagaaaccgtatacgccgcagtggtaaggtgtgcttacgtcccttattattcatagtgaaagcatgccggattgcggctaatgatgagtaaaaggaaatccgttgcagatgattgtgcgcatactgctgctgtttatcgctctgttcacctttggtgtgcaggcgcaggctatcaaggaaagctatgcctttgccgtgctgggcgaaccccggtacgcgtttaatttcaaccattttgattatgtgaaccccgccgcgccaaaaggtgggcagataacgttgagtgccctcggcaccttcgataatttcaaccgctatgcactgcgcggcaacccgggcgcacgcaccgagcagctgtacgacacgctatttacgacttccgatgacgaaccaggcagttattacccgctgattgctgaaagcgcacgctatgctgacgattattcctgggtggaggtcgctattaatccgcgcgcccgttttcatgatggtagccccattactgcccgcgatgtagagtttacttttcaaaaatttatgaccgaaggcgtgccgcaatttcgtctggtctacaaaggcaccaccgtcaaagccattgcaccgttaaccgtgcgcattgagttagctaaacccggtaaagaagatatgctgagtctgtttagcctgccggtatttccagaaaagtactggaaggatcacaaacttagcgacccgctcgccacgcctccgcttgccagtggtccgtaccgcgttacgtcctggaaaatggggcaaaatattgtctattcccgtgtgaaagattactgggcagcaaacttaccggtaaaccgtggacgctggaatttcgacaccattcgctacgattattacctcgatgataatgtcgcctttgaagcgtttaaagcaggtgcctttgatttgcgtatggaaaacgacgccaaaaactgggccacgcgttataccggtaaaaatttcgataaaaaatacatcatcaaagatgagcaaaagaacgaaagtgcccaggatacgcgttggctggcgtttaatatccaacgtccggtattcagcgatcgccgggtccgggaagctatcactctcgcctttgactttgaatggatgaacaaggcgttgttttacaatgcctggagtcgcacgaacagttattttcagaataccgaatacgcggccagaaattaccccgacgccgcggagctggtgcttctggcaccaatgaaaaaagatctaccgagtgaagtcttcacacaaatctaccagccgccggtatccaaaggcgatggctacgatcgtgacaacctgttaaaagccgacaaacttctcaacgaagcgggctgggtgctgaagggtcagcaacgcgttaatgccacaacgggtcagccactcagctttgaattattgcttcccgcaagcagcaatagtcagtgggtattgccgttccagcacagcctgcaacggctgggtatcaacatggacattcgcaaggtggataacagccaaatcactaaccgcatgcgcagtcgcgactatgacatgatgccgcgcgtatggcgggcgatgccgtggcccagttccgatttacagatttcctggagtagcgaatatatcaattccacttataatgcccccggcgtgcaaagcccggttatcgacagcctgatcaaccaaattattgccgcgcagggaaataaagaaaaattactgccgttggggcgagcactggatcgcgtattaacgtggaattattacatgctgccaatgtggtacatggcggaagaccgtctcgcctggtgggataaattctcccagccggccgtgcgccccatctatagcctcggtatcgatacctggtggtatgacgtcaataaagcggccaaactgccgtccgccagcaaacagggagagtaaatgggcgcttacctgattcgccgtctgttgctggtgatcccaacattatgggcgattatcaccatcaactttttcatcgtgcaaattgcgcctggcggtccggtcgaccaggccatcgccgccattgagtttggtaatgccggagtattacccggcgcaggcggtgaaggtgttcgtgccagccatgcgcaaacgggtgtcggcaatatcagcgacagtaattaccgtggcggacgcggattagatccagaagtgatcgctgagatcactcatcgctacggttttgataagccgatccacgaacgttacttcaaaatgctctgggactacatccgctttgattttggcgatagcctgtttcgcagcgccagcgtgctgacgctgattaaagacagtctgccggtttccatcaccctcggattgtggagcacgctgattatctatctggtgagcattccgttaggcattcgcaaagctgtttataatgggagccgctttgacgtctggagtagcgcatttatcatcatcggctacgccattccggcctttttgtttgccatcctgctgattgtcttcttcgcgggcggcagctatttcgacctgttccctctacgcggcctggtttccgctaactttgatagcctgccgtggtatcagaaaatcaccgattatctgtggcatatcacgctgccggtgctggcgacagtgattggtggctttgcggcgctgaccatgctgacaaaaaacagtttccttgatgaagtgcgcaagcaatacgtggtgaccgcgcgtgcgaaaggggtaagtgaaaaaaatattctctggaaacatgtgttccgcaacgccatgctgctggtgattgccggttttccggcgacgtttatcagcatgttttttaccggcagcctgctgattgaggtgatgtttagtctcaatggtctgggcttactgggctacgaagcgaccgtcagccgcgattatcctgtaatgtttggtaccttgtatattttcaccctgattggcctgctgctgaatattgtcagtgatatcagctatacgctggttgatccgcgtattgattttgagggacgttaatgagccgactcagccccgtcaatcaggcccgttgggcgcgttttcgtcataaccgtcgcggctactggagcttatggattttcctcgtcttgtttggtttgagtttgtgttctgaacttatcgccaacgataaaccgttgctggtgcgttatgacggcagttggtatttcccgttattgaaaaactacagcgaaagcgattttggcggcccgctggcaagtcaggctgattatcaggacccgtggctgaaacaacggctggaaaataacggctgggtactgtgggcaccgattcgctttggtgctaccagtatcaactttgctaccaataagcccttcccttctccaccctcccggcaaaactggctgggaacggatgccaacggcggcgatgtgctggcacgcattctctatggcacgcggatcagcgttctgtttggcctgatgctgactctctgttccagcgtgatgggcgtgctggcgggggcgctacaaggctattacggcggtaaagtcgatctctggggacaacgctttattgaagtatggagcgggatgccgacgctgtttttgattattttactttccagcgtcgtacagcctaacttctggtggctgctggcaattactgtcttgtttggctggatgagtctggtcggcgtggtgcgggcggagtttttacgtactcgtaatttcgactacattcgtgcggcacaggcgcttggcgtcagcgatcgcagtatcatcctgcgtcatatgttgcctaatgccatggtcgcgaccctcacctttttaccgtttattttatgtagtagcataaccaccctgaccagcctcgatttcctcggcttcggtctaccgctcggtagtccgagtctcggtgaactgctgttacaagggaaaaataaccttcaggccccgtggcttgggatcaccgccttcttgagcgtggcgatattattgtctttgctgatctttattggtgaagccgtccgcgacgcatttgatcctaataaggcggtgtaacatgacgcaaactctgttagcgattgaaaatttgagcgtgggttttcgccatcagcaaaccgtacgtacagtagtcaatgatgttagtctacagattgaggctggcgaaacgctggcgctggtgggtgagagtggtagtggcaaaagcgttaccgcgctgagtattttacgcctgctcccttccccgccggttgaatatctctccggcgatattcgttttcatggcgaaagcctgcttcacgccagcgatcaaacgttgcgcggtgtacgcggtaataagatcgccatgatttttcaggaaccgatggtgagcttaaatccattgcataccctggaaaaacagctttatgaagtgcttagtctccaccgcgggatgcgtcgggaagcggctcgtggcgaaattcttaactgccttgatcgcgttggtatccgccaggcggcaaaacggctgacagattatccgcatcagctctccggcggcgaacggcagcgggtgatgattgcgatggcgctgttaacgcgaccggaattattaattgccgatgaaccgaccaccgcactggacgtctctgtccaggcgcagattttacagctgttgcgcgaactgcaaggcgagctgaatatgggcatgctgtttattactcataacctcagcattgtcagaaaactggcccaccgcgtggcggtaatgcaaaacggtcgctgtgtcgagcaaaattacgccgctacgctatttgcaagtcccactcatccttacacacaaaagctactcaacagtgaaccgagtggcgatccagtgccgttgccagaacctgccagtacgttgctggatgttgaacagcttcaggttgccttccccattcgcaaagggattttgaagcgcattgtggatcataatgtggtggtgaaaaacatcagttttacgctacgagcgggtgaaacactgggtttagtgggcgagtccggttccgggaaaagtacgacgggactggcgctgctgcgactgattaattctcagggcagcatcatctttgacggtcagccactgcaaaatttaaatcgccgccagctgttacctattcgtcatcgcattcaggtggtatttcaggatccaaactccagcctcaacccacgactcaacgttttgcagattattgaggaaggcttacgggttcaccagccgacgctttctgccgcacaacgcgaacaacaagtgatagccgtgatgcatgaagtgggattagatcctgaaacacgccaccgttatccggcggagttctctggtggtcagcgacaacgtattgcgattgccagggcattaattcttaagcccagcctgatcatacttgatgaaccgacaagtagtctcgacaaaacggtacaggcgcaaatattgacgctattgaaaagtttgcaacaaaagcatcaactggcctatttgtttatcagccacgatttgcacgttgtccgcgcgttatgtcatcaggttatcatactgcgacaaggggaagtagtggaacaaggaccgtgcgcgcgcgtgtttgccacaccgcagcaggagtatacgcgtcagctactggcgttgagctgacgcttaaaaaggattgtagttactaaagggttcggcaattgccacaccaaaatttttcaatcggcatgttgcagcaaactcgtcctggcgatttacaaacaggcacggctcaccttcacactccagcacgctacatggaacttcgatgtcgcttaacgcctggcttagtttatacatcacgctccatgcattatcaccatccgggctaagcaatttaagcgccaccaggctgttgtcaccgcacggtccattttgcggaatcggttcaaccttgctacctgcgaaaccagcagaccagcgatagttctgcggcagtcgatggacgatactgagttgtaaactagtcacttattttccccggaagcacattcacttcacaatttgtttacatcaattttaacacatcatcaacaatccgtctttatacagatcgtaaagattgatgcctcgcctgcgtggcctctatggctctgatttaagtaatatctgcgggcgtggtcacgtttgcggggctatatgtacccgtttctgcgatctaactcaacctttttaactacaatgatgtgactttttacataaattgattttacataaaataaacatatatcgggggaatgatagatttgtggttgacatgcatcaacaaaggaagccttttagcttcctcgttgtgcaatagatcaccgttttttcggccgactggcgtacagacagaagagaatggagctggttgcgcagaatgcaatactccaaatcatcggccatgcagagttaaaggtcgcaagagaaagcaatgcgccaacaattgcccctatgccaaaacggaaggttcctgccaggctagatgccgttcccgccatatggggaaactcatcaagaatgaccgccatcgcattggaactcaccatgctcacgcagcccacaaacgccgcaacgccaaccaccaggctccaaaatcccagccccagcagcgcactgatgaccatccacgctgccataataaattgtatccacaacccgctgcggaacatatttaacgcgccaatgcggcggacgaagcggctgttaaagatggtcatcacgaacagaaaaacaatgtttagcgcaaagtaataaccaaagttttccggcgcgacgtggttaatttcaatataaacaaacggtccggcgcttaagaaactgaacatcccggcaaagctgaaaccactggcaagcatgtagctcaggacacgtttatggcggaacagcgccgcaaagttaccaatagtggtacgaatgtgaaatggctgacgacgctccggtggtaaggtttctttaatcaggaagaaaatcattgcgctagccagaatcgccgctaatgccaggatccagaagatgtaatgccagctcagccacaccagcacccagccgccaactatcggtgccatcagcggtgcaatggttgtcaccagcatgacaaagctcatcatccggctgaactcttctttcgggtaaatatcgcgcatcagggcgttaatgaccacgctggccgcagccgcagccagcccgtggaagaaacgcatcacaatcagctgatcgatggtgtttgccaacgcacacgccaccgcggcggcggcaaacaccagcgtaccgccgagcaccaccggcttacgcccgaagctgtctgccatcggcccgtagattaactgccccaacgcaaagcccagaatataagtactgagggtcatctgcgtactgcccgccggtacgccaaactgcgcactaattaccggtagcgcgggcagatacatatcaatgctcagcggcatcaacatggccagcaggccaaggataaaaacaatagcaaagctgctatgctgtcgggtggtcacaacgggctcctgaaagtcattgaaaagttagacgacgctggcaatttcttcttcagttaacggacgatattcaccgggggctaaatcagcatccagcgtaataccgccaatacgttcacgatgcagctcaaccacgtggttacccacggcggcgaacatgcgtttcacctgatgataacgcccttcgctgatggtcagacgaacctgcgttggggtaatcacttccagcaccgcaggcttagtgagatctttttcgttatgcagctgcacgcctttagcaaattgctctgccgtatcgtcagctacaggactttccagtgtcaccagataggtcttctcgcaatgatggcgcggagaagtaatgcggtggctccactgaccatcatcagtcatcagcaccagaccggtggtatcaatatccaaccgccccgccgcatgcagtttccacgctaccggttcatcaagaaaatagagcaccgttgggtgatcagggtcgtccgtggagcaaacatagccctgaggcttattgagcatgaagtaacgtggaccgtgttgctgcgccagcgggttgccatcgtaagcgacatcatgttcaggaagcagtttgaacgctgcattacggacgatttcgccatcgacggtgacacgattgccgcggatttcacgcccggcaatagcacggctaacgccgagttgctgtgcgataaatttatcaagtcgcatgtgtgtgattttgcctgtaaaaacggaggtcgggcattgacccgaaaatctgaactgttgtctgcccagtatagcggtctaataacatccctcaagggaaaaagatccatggcatactattagcagaataatctacctacgcgagaccatgatttttacacttcgcccatatcagcaagaagccgtggatgccacgctcaaccattttcgtcgtcataaaacccctgccgttatcgtgctgcccaccggcgcaggtaaaagcctggtgatagcggaactggcacggctggctcgtggtcgcgtgctggtgctggcacacgttaaagaactggtggcgcaaaaccatgcaaagtatcaggcgctggggctggaagccgatatttttgccgccgggctaaagcgcaaagagagccacggtaaagtggtatttggcagcgtgcagtctgtcgcccgtaatcttgatgcctttcagggtgaatttagcctgttgattgtcgatgaatgtcaccgtattggtgacgatgaagagagccagtatcagcaaatcctcactcacctgacaaaagtgaatccccacttacgcctgctggggctgactgccacgccttttcgattgggcaaaggctggatctaccagtttcattatcacggcatggtacgcggcgatgagaaagcccttttccgtgactgcatttatgagctgccgctgcgttatatgattaaacacggctatctgacgccgccagaacgactggatatgccagtagtgcaatacgatttcagccgcttgcaggcacagagtaacgggctgttcagcgaagccgatctcaaccgtgagctgaaaaaacaacaacgtattaccccgcacatcatcagccagattatggagtttgctgcaacgcgcaaaggggtgatgatttttgccgcgacggttgaacacgcaaaagagattgtgggattactgcctgccgaagatgcagcactgattactggcgacacccccggcgctgagcgcgatgtgttaattgaaaattttaaagcccagcgttttcgctatctggtcaacgtcgcggtactgaccaccggatttgacgccccgcacgtcgatcttatcgccattctgcgccctaccgaaagtgtgagtctttaccaacaaattgtcgggcgcggtctgcgtctcgctccgggcaagactgattgcttaattcttgattatgcgggtaatcctcacgatctctacgcgccggaagttggtacaccaaaaggcaaaagtgacaacgttccggtacaggttttctgccctgcctgcggttttgccaacaccttttgggggaaaacgaccgccgacgggacattgattgaacactttggtcgtcgctgtcagggatggtttgaagatgacgacggtcatcgcgaacaatgtgacttccgtttccgttttaaaaattgcccgcaatgtaacgcggaaaacgatattgccgcccgccgctgccgcgaatgtgacaccgtactggttgatccggacgatatgttaaaagcggcgctacgactgaaagacgcgctggtattacgctgtagcggcatgtctttgcaacatgggcacgacgagaaaggcgaatggttgaaaatcacctattacgatgaagacggcgcggatgtgagtgagcgtttccgtctgcaaacacctgcccagcgtaccgccttcgagcagctttttatccgcccgcatacgcgcacaccgggcatcccgctgcgctggatcaccgccgccgatatcctcgcccagcaagccttattgcgacacccggattttgtcgtcgcccgcatgaaaggccagtactggcaggtgcgtgaaaaagtgttcgattacgaaggtcgttttcgtctggcgcacgaattacgcggttaatggtagttttgattgatgtataaggcgattgagtatagaatctcgcccgcttttgcatacgcaaagcagatcacttacctgttgctgggtcgcctgtagcaggattaatttaagagagaaagaaatgtttactatcaacgcagaagtacgtaaagagcagggtaagggtgcgagccgccgcctgcgtgccgctaacaagttcccggcaatcatctacggtggcaaagaagcgccgctggctatcgagctggatcacgacaaagtcatgaacatgcaagctaaagctgaattctacagcgaagttctgaccatcgttgttgacggtaaagaaatcaaagttaaagctcaggacgtacagcgtcacccgtacaaaccgaagctgcagcacatcgacttcgttcgcgcttaattgctgaataagttgtaaaaaaccccgctccggcggggttttttgtatctgcagattatgcctgattacggtattgctattttttgcaggccagataaggcgttcacgccgcatctggcattcagaacacaaaaccgattaattgccgccagacgtccggcgctgcaattggtcgcgcaaattcggcggcgtgcctttaatggtcaaggtatcggttgctggatcccagaagatgcgttcacctaacagcatcgcatcaaagttaatagtcaagccaccgccgctaccggcaaacttcgtcaactgacgcagtgtgctacggtctgccgggaagctctcttccagttcgtagcctttttcagccgcaaactccgtgaagctcacttcgcttacgcctgccagctctttgctcaggcttttcagttcgatctcttcgcctgcctgcagctgctcattacagtagctataaacctgctggcgcacgttctgtcgctctgctttatccagttgtgcttcggcagtgaaatcatcaaccgcttgcaacagcccacggttttgcgctttcgcgtttaacccttcgctggccccgaggaaatccataaagaaatccgccactttgcgccctactcgccctttcaggaaagtgagatagcgggtggactctggattggtttcccattcggttaaatcgatacgcgcaacaatatccgcatgattgatatcaagataatgggttgggttgatgtcgagattttcgttaacgcgcatactgctcaggttgctcagaactgccaccagcaaatactccaccgccagatagcgatagtggcaaaacagcacgaatccaccgtcagcaaaaggatatttcgctaattcgtcacgcaggcggccggttgccgcgcggctaaatgccaggaagtcctcttcgccctgacgctgtaagcgcagcgtctgcgccagttcactctcttcgctaaacaagccgtaagctttatttttggcgctatagacccgatgcagttctgccaccatctcaacgacggtttctgtcggttccagcaaactatcgcgcaacaccagctcaaggttctgctcatcacgcttgataagctggtgcagagcaatctggttgatatccagactcatgataaactctcctttaagaccgggcggtattcaaccaccgccggttaagcgacgcaataaaagatggcggtcattttacagaaggcagcgtaacgagaatgatttaacgcataaaaaagcagaaaaaaaaccgttgctacggtaatatgttgccctttcatcaactaactgatttcgatttatgccacaaatttcccgctacagtgatgaacaggttgaacaattgctcgcagagctgctcaacgtactggaaaaacataaggctccgaccgacctttccctgatggtgttaggcaacatggtcactaaccttatcaacaccagcattgccccggcccaacgccaggcaattgccaactcttttgcccgcgccttacagtcctctatcaacgaagacaaagcgcactaagggaaacagataacaggttatggtaactcatcgtcagcgctaccgtgaaaaagtctcccagatggtcagttgggggcactggtttgcactgttcaatattctgcttagcctcgtcattggcagccgttacctgtttatcgccgactggccgacaacgcttgctggtcgcatttattcctacgtaagcattatcggccatttcagcttcctggtgttcgccacctacttgctgatcctcttcccgctgacctttatcgtcggctcccagaggctgatgaggtttttgtccgtcattctggcaacggcgggaatgacgctattactgatcgatagcgaagtctttactcgtttccatctccatcttaatcccatcgtctggcaactggttatcaacccagacgaaaatgagatggcgcgcgactggcagctgatgttcatcagcgtgccggttattttattgcttgaactggtgtttgcgacgtggagctggcaaaagctgcgcagcctgacgcgtcgtcgacgcttcgcgcgcccgctggccgcattcttatttatcgcctttatcgccagccatgtggtgtatatctgggccgatgccaacttctatcgcccgatcaccatgcagcgcgctaacctgccgcttagctacccgatgacggcgcgacgttttcttgagaagcatggtctgcttgatgcgcaggagtatcaacgccgtcttattgagcaaggtaatccagacgccgtttccgttcagtatccgttaagcgaactgcgctatcgcgatatgggcaccgggcagaatgtgctgttgattactgtcgatggcctgaactacagtcgcttcgagaagcagatgcctgcgctggcaggttttgctgagcaaaatattagcttcacgcgccatatgagctccggcaacactacagacaacggcatctttggcctgttctatggcatcagcccgagctatatggacggcattctgagcacccgtacgcctgcggcattaattactgcgcttaatcagcaaggctatcagctggggttattcagtagtgatggctttaccagcccgctgtatcgccaggcattgttgagtgatttcagcatgccgagcgtacgcacccaatccgacgagcagaccgccacgcagtggatcaactggctgggacgctacgcacaagaagataaccgctggttcagctgggtttctttcaatggtactaacattgacgacagcaatcagcaggcatttgcacggaaatatagccgggcggcaggcaatgtcgatgaccagatcaaccgcgtgctcaatgcactgcgtgattctggcaaactggacaatacggtggtgattatcactgccggtcggggtattccactgagcgaagaggaagaaacctttgactggtcccacggtcatctgcaggtgccattagtgattcactggccaggcacgccggcgcagcgtattaatgctctgactgatcataccgatctgatgacgacgctgatgcaacgcctgctacatgtcagcacacctgccagcgaatatagccaaggtcaggatttgttcaaccctcaacgccgtcattactgggttaccgcagcggataacgatacgctggcaattaccaccccgaaaaagacgctggtactgaacaataacggtaaataccgcacttacaacttacgtggtgaaagagtgaaagatgaaaaaccacagttaagtttgttattgcaagtgctgacagacgagaagcgttttatcgctaactgattaattataaatcagttagcgaaatatcttacttgcaatcggtgtggaaaacggtagtattagcagccacgagtcggcacgtagcgcagcctggtagcgcaccgtcatggggtgtcgggggtcggaggttcaaatcctctcgtgccgaccaaaaatcccaagaaaaaaccaacccttacggttggtttttttatatctgcaattaattcgataaacagaccgtgacacatcacagcctgtttattttctgttatcagaacgtcctgagctttcatcctatgaaattaattgctgttaaaagcattgggtacagaaaatacccatagctccatacccggagtcagtttttaaaaactgtttaaagaaatgcacaagtattgtgattgattttttagttgtttttcttgatgagaagctgatgcaaaattccgtctttataatgaaaatgatgccaaagcgaacgacaaggttgtagttttcactacatgtccatacataaaatggggtaacattcacgcgcctggtagcgttaccaacgctacgctcaaacataatgattctaataaaacctcaggagactactatgcctgaagcaacaccttttcaggtgatgattgtggatgatcatccacttatgcgacgcggtgttcgtcagttactggagcttgatcctggctctgaagtggtcgccgaagcgggcgacggcgcgagcgctatcgatctggcgaatagactggatatcgacgtgatcttgctggatctcaatatgaaaggtatgagtggcctggatactctcaatgccttgcgcagggatggcgttaccgcgcaaattattatcctgaccgtatccgatgcctccagcgatgtctttgcgctgatagacgcaggcgcagacggttatctgttgaaagacagcgacccggaagtattgctggaagcgattcgtgccggagcgaaaggcagcaaagtctttagcgaacgcgtcaatcagtacttacgtgaacgtgaaatgtttggcgcggaagaagatcccttcagcgtgctgacggagcgcgagctggatgttctgcacgagctggcacaggggctgagtaataaacagattgccagcgtgttgaatatttccgagcagacagtaaaagtacatattcgcaatctgctgcgtaaactcaatgtccgcagtcgcgtggcggccaccattctgttcctgcaacaacgcggggcacaataaaaatagcccgatggatttatcatcgggctgagatttatgacaaacgcaaaactgcctgatgcgctacgcttatcaggcctacgtggatcgatcaatttattgaatttacacaattttgtaggccggataaggcgttcacgccgcatccggcataaactaagcgcactttgtcaacagtctagcccgatggcatcaccatcgggcctctttttatttactctcctgcgggctcaaatgttgcatcgcctgcgcgatactacgttcaatcaccgcacggcgagtatcgttggcaggtaagagtttcaacatcatctcccacgcggcaacggcttcgccaaatcgctgctgctcaaaggcattaaacgcatacatgcttagcacacggatattgctatggtccgttctcaccagctgacgtagcagttcaccgccgaggcggttgtcgttgggatcagaactacgagtcaacgcttcagcgtatcccagtgcagcatcactgtttttcggatcgaggcgatacgcagtggcgtatgcatcggtggcgatactggcgttacccagcgccatgccaacgcggcccaacataatccagccttctatatctcccggatttttttgcagttgagtacgcatccccagcgcaagacggctcatctcttcttcgttgagcggatcggctttcggatccagcgccctgtccagcaacgccggagcctgtgccgtggcctgctgccagattttcacctgctgataattgccagtctggtagtagctgacgccagccacaattaacgccaccacaatacccggcagataaacaacatatccggcacgcttaccttccggcacgctttgttcaggaaacgcttccggcaccacgcgtacccgacgccggctgcgggcgtatatgacccaaccgccaatgccaatagccactactggcagcacccacagcagcacggtcagcggcgttaacggcggatcgtaagtgacgaagttgccgtaacgcgccaccatataatcgacaatctcttttttacttttaccttcctgcatcagttcatacactttctgacgcaggtcggtggcaatcatgctgttggaatcggcaatgctgttgttctggcatttcgggcagcgcagttcttcagtgagctgacggaactgttgttcctgtgcttcatctttaaactgcaacacatcgatggtcgccagcgcactgccggagatcatcagcatcagcacgcccaataaaaacctcattgtgcggcctccttactgtatttctcccacagcggcttgatctcttcttcccagacgcgaggattcagatcgcccgcatggcgatagcgaatgatgccgttgccgtcaataagaaacgtttctggcgcgccatagacaccgagatccagccctaacatgccatcgccatcaaacaggcttagcgcgtaaggattgcccagctctttcagccagctgattgccttctggcgatcgtctttatagttcatgccgaccacgcggatgccctgcgcagaaagctgattcagatattgatgttccgcacggcaggtcggacaccaggtcgcccagacgttaagcagtactggtttgccctgagtcagcacatccgcctgataaaactgccccggattgtccagactttcgagacgaaacttcggcacaggcttgccaatgagcgcgctttccagattggtcggatcatccccttcggcattacgcgccagctgccacagcagcgccgcggcaatcgccaggaagataatcaacggaattaacaatactttgcgcttcatacggcctccggcgcagttttttgcggactcacgcgcttacgatagcgaggatcaaacagacacagcagtccgcccaacgccatcatcagcccgcccgcccaaatccagcgaacaaatggtttgtagtaaagacgcacggcccacgcgccgttttccagctcttcaccgagggccgcgtacaggtcacgcgtgatgccgccgtcaattgccgcttcggtcatcatgctcccggcagtgttgtaataacgtttttccgcatacagcaccgtttccggcttgccatcgcgcgttacgccgatagtcgccacaccgccacgccagttcgggccagtcacctctttgacatcacggaaggtgaagcgatattcatgaatatcgacgctatcgccggacttcatgcgcacatcacgctcaacgctatagttctggctaaaggcaatgccaacaattgtcactgccagcccaaggtgagccgccaccatcccccaataactgaaggtggttttcgtgccgcgactaatacgtagcgcagcttccgcaattgccagcaccgcaatccagcaggccattgccaggccgagcaccgtcatcgccacaactttgctttcgaacagccacggcaacagcaggctcagcaccagcgtagagatgaaggcgataatcaataaattgcggatcttacgcgggcgatcccgcccccagcgcaccagaggaccgacaccaagcagtagcgcaaacggcaccatcagccaggtaaacatggtgttgaagaacggttcgccaatgctaatactgcccagtcccagttgcttatgcaccaacggcagcagcgtccccagcaacaccaccagcatcgcagcgaccagcaaaacattgttcgctaacagcaaagattcccggctccacagcgcattgtttacgcgactgcgaactttgtgtccacgcgcggcaaacagcagcaggctaccgccaatcaccagcaccataaaggcgaggataaacataccgcgcgccggatcagacgcaaacgcgtgtacgcttaccagcacgccggaacgcacgaggaaagtccccaacagacacaagctgaaggcactgattgccagcagtaatgtccacgctttgaagctggcgcgttgttcagtgaccgccagactgtgcatcagcgcagtccccaccagccacggcataaagctggcgttttctaccggatcccagaaccaccagccaccccagccgagttcgtaataggcccatgcggaaccgagcacgatgccgagcgtcaggaagatccacgctgccagcgtccacggacgagtaaaacgcgcataagtgctgtccagacgcccgctcagcaaagaagcaatggcaaaagcaaacgccacgctgaaacccacgtaccccatataaagcagaggcggatggaagatcagccccggatcctgcaatagcgggttaagatcgcgaccttcaatcgggaagttcggcaacgtgcgagagaacgggttagaggtaaagagaatgaacagcaaaaagccgacactgaccatccccattatcgccagtacacgggccacaatatccagcggaatacgctgactaaaaatcgccaccgcaaaggtccagccgctcatcagcagcacccacagcagtaggctgccttcatgcgcgccccaggtagccgccacgcgataccacaccggaagctgggtattggagttgctggcaacataggtgacggtgaagtcgttgaccacgaaagcattgaccagcaccagaaatgcgccagccacagacataaacagcagccaggcaaacaagcgggaagacgccatcatgcgcgcatctccgcgcgccacgccccatagcggatacacggacagcagcagcgcaattcccagcgccaggcacagcagtccgttaccaatttctggcatcatgatgctgggtccttataaacttacgtcaacttgctgggtccttataaacactcgccgggcgacggtggttagcttccatcgctttctcaacttctggcggcgtatagttttcatcgtgtttcgccagcacttctttcgcgaggatatgattgcctttttccagttcgccctgcaccacaacgccctgcccttcacggaacagatccggcaaaatgccttcgtaagagacatccacactgccttcagcatcgtaaatggtgaaggtcactttcaggctattgggatcgcgctgcacactacccggcatcaccatcccgccaacgcgcagacgctgaccgacttccggcatttgctgagtttcacgcttgccgtagagaatttcccccggcgtataaaagagatcgatattgctgcgcagcgcatatagcaccagaccgatagtcagcgccagccctgccaacacggcacaggcaatccacaagcggtttttacggcgaatattcatgcagcctcctgctgttgcgcagcacgtaaacgcgcctcacgcgcccgctgttgcgccacgccacgcagaattgcgcgatgttgcatcacgctgtgcacgaccaaaaccaccagcggaataacggtcatcaccaccgccagccagacaaaaaaggcgtaaccgcccattgcgaaaaattcattccaggaagcaaatgcaggggtcatttacggcctcttttcagtatcagttcactcacccacggacggcgtttttccatcagcaaaatcaaattacgcatccgcatcagcgtcagcgtggcagacaggagcaggaagccaaaaatgctccagcgcagcgggctacgcatcgccggatcgatactttgctgcatccgcgtacttccctgatgcagggtgttccaccactccacggagtaatgaataatcggcagattcaccacgccaatcagcaccaggatacctgccgcacggcccgccagacggcggtcgtcgaaggcgtgccacagggcaatcacacccacatacaaaaacagcagcaccagttcagaagtcagacgtgcatcccatacccaccaggtgccccacatcggttttccccatgcagagccggtaaccagggcaataaaggtaaacacggcaccaatgggggccatcgccgccaccgccaggttggccattttcatctgccagacaaggccaataaacgctgccactgccatacttgcataaatgcccatgctccagatcgccgcaggcacatgcaggtagataatgcggtagctatttccctgctgataatcagccggagcaaagccgaatccccagatccagccgacggtaagcacgaccacactggcaattgccagccacggtataaaccagccacagatttgatacagccgtggtgggatcgccagttgatgcagtgttttccacatagtttcgataccagactcgaacaaaaatcagtaatccagcgttattgaatgctgattcgtaacgctgccgccgtcgcaaaaggacttaatgtcgcggtgcctgccagcaacgcgcctaaaattgccagatacccgtcaacgggcaaatgcatagaagccgcgtccatcgcggcggtggcaaagatgagtaatgggatagtcagcggtaacaccagtatgctgagcagcacaccaccgcgcttaagtcccactgtcagcgccacgcccggtgcaccgagaaagccaagcgtaggcgttcccagcagcagcgtcagcgccatcacttgccagccataaacatccattcccagtagcattgctaccagtgggctaaggatgagtaacggcagaccggttaccatccagtgcgccatcaccttcgccagcacaacggcgggcaagggtaacggcaacaacatcaattgttcaagactgccgtcctgcaaatcgtcacggaacagtcgttccagcgccagcaaggaactaagcagcgcagcaacccagataatgcccggtgcaatacgcgccagcagttgcggctccggaccgatactgagcggaaaaagggtaattacaatcaggaagaaccacagcgggttggcgatttcggcgctatggcgaaacgctacacgcagctcaagacggaaaatgcgccagaacatcatgcggccctcgtttgcgtcagactaatgcggcgaattttactttcagcaacgttgagcggctggtgggtagtcagaatcacaatccccccctgctccgtatgctgcgccatacgctgggtcagacgatcgacaccgttaacgtcaatcgcggtaaaaggctcgtcgaggatccataacgtggcacgggtcagccacagacgcgctaaagcgacgcggcgttgttgcccggcgctgagctgatttacaggaatatcttcgaatccggcaagcccggcctgcgccagggcttccagacattgtgcggtatcgccatcgcgatgataaaagtgcagattttctaacgccgtcagccgggttttgatccccggctgatggcctatccataacaggttttgatggtagctgtcgcgtacctgatgcaagggctgcccttgccagagaacctcgcctgcgtcagggcgagacaaccccgtcagcaaacggagaagcgttgtcttccccgcgccgttgctaccggtgatttgtacccactctcctgcgttcagcgtaaaactcaagccactaaataaggttcgttcatcccgctcacaaagtaactctctggcttcaagcatacccacgcaataaccctgttaaaaacctggctcgacttcacgcatatcgggcagcttgtgcgctatccctttatggcaatcaatacaggtttgcccatctttcaccgcctggtcatgcatcttcgcggcaacgcttttctgggcggttgtatccatatactcgaagttgtgacagttacggcactcctggctgttattgtccttcatgcgccgccactcattctgtgccatcgtcagacgatgagcttcaaatttctgcggcgtgtcaataacgccaaaaattttaccatacagctctttacttgctttgagcttgcgtatcatcttcggcacaaactcgtgcggaacgtgacaatccggacaggtcgcacggacgccgctacggttgttgtagtgcacggaatccatgtattcctgatacaccgtgttgcgcatttcgtggcagctaatgcagaactcttcggtattggctttttccatcccggtgttaaagccaccccagaagacgatgccgccaacaaaaccgatcaacagcagcgtccccagcgccagacggctgggggtacgccaccatttccacaggcgcttaatcagaccaggcttacggtcagaatttcccataataacctcttatttcccgtaacctttacttggggtaaaggtattccccacgattggcgcggtatcggcctgcggtacgtgacattgcagacagaaataacgacgcggagccacttccgcgcccactttgccgtcgctgtccataaagtgagtaggactgatacgcggcgcgccagtggtgcgatagctttcgacaccgtggcactgcaagcagcgattggtattggtcgttacctgataaccttcaacgctatgcgggatcattggcggctgattcacatagttcagcggcatccgatcctgctcttttggcatccgaatggccccttcctgtgtcccggatacttccgggctctggctaaaatcgacgccattagccgcccaaaccgcgccgcttaccaccagggccagcatcgccgtccattgacacagcgctttcttcaggtcatggcttttcatgatttcgctcccgaactccattatgtcaacttttcgctccgctactccatcgtgtagttattgtaaatacatcctcagaacagacatccacgcagcgaccgcacgtcatgcaatcgcggctggtgacctgcaccgggctttgttcatccagcaccggggcacgtagcacatgcggttccgggcaaacatgaaaacaatccatacagcggttacatttctgccgatcggtggccgcaacggtaatcacacctttgctacccagcacgccatacagcgcgccaaccggacaaatgtgcccgcaccagccgtgttcaacgaccagtagatcaaataaaaacagcgcgagaataagcagcgcgccgctgccgaagcccattaccaggctacgccccatcagagaaacggggttgatccattcccaaatgagcgtgccagttaaggcacttcccaccagaatgaccaccaacagcacgtagcgaatgtggcgagggatcgtcgcagactgattgaggtcaaagcgcctgcgtaaccagttcgctaagtcggtaatcgggttcagcgggcagacccagctgcaaaataatcgctttcccgccagggcgtagagcacggtgataatcaccgcaccggtcaacgccaccgtggcaggcagatgaccactggcaagactttgcagcgtcatcagcggatcggtcagcggaacggtgtcgaataacaggctactgctgtagttgccgtgcaagatccacacaccaaaccatggaccgctcaaaaacatccccagcacgaagaactgacaaaggcgacgtaacaccagccaacggtgactgcgccaccagccttttttctccagcgcctcgcgcccggcgtcacgtttacgatttgccattgttcccctccagccagccgttacttagcttttgccattgttcccctccagccagccgaagcggtaatggtgacctaactcccctttcgccagactcagcggtaacaccttgattgccggttgttccagcacgcatactttttcgcacttaccgcaaccggtacaggcgtcgctgtgaaccgtcggcagaaagcgggcgtgcttaccggtacgcgtgttgcgctccagctccagggtgatggcctcatcaattttcgggcattcgcgataacaaacatcgcagcgcagcccctgaaagttgagacagttttcctggtccaccagtaccgccagccccatccgcgcgtcgtcgatgctttcaatctcacgatccagcgcaccgcttgggcacactttggcgcacggaatgtcctcacacatttcgcaaggaatatcccgtgcgacaaaatatggcgtgcccgcgctcagaccagaggccagcgtcgccagttttaaggtgtcgtaagggcaagcctgaacacactgaccgcaacgcacacaggcactggcaaaggcgttctcgtttatggctccgggcgggcgcaaccgcacgccagatgcgcgtgcggtttgctgttgtaaccccagcgccacacccacggcagccagcccgcctgctgtgcgaacgacatcgcgcagaaagcggcggcgaccattttgaggtttcgcactccgggacataatggcttacaccttctccagtttgaccgcgcacttcttgaagtccgtctctttgctgagcggatcggtcgcatccagcgtcagtttgttaaccaactgtgcggcgtcgaagaacggcatgtacaccaggccctgtggcggacggttacgaccgcgcgtttcaacaatgctgatcacttcgccacggcgagaaaccactttcactttgtcgccacggcgcagatcgcgcgctttcgcatccagcgggtgaataaacaggaccgcttccgggaaggcgcggtgcagttctggtacacggcgagtcatactgccggtgtgccagtgctccagaacgcgtccggtagagagccacaggtcgtactcttcatccggtgcttccgccgccggttcgaatggcagtgcgaagatcaccgctttgccatccggtttaccgtagaacttatagccttcgcccgctttcacgtacgggtcgttaccttcgctgtaacgccactgcgtttctttaccgttcaccaccggccagcgcagaccgcgcgctttgtggtagtcatcgaacggtgccagatcgtgaccgtgaccgcgaccaaaccatgcgtactcttcgaacagccctttttgcagatagaagcccagctcgcgggattcatcgttcagctgatcttccgccagttcggataccgggaatttgctcacttccggtgtggcatacagcacttcgtacagcgttttgccacgcagttccggtttcttcgccagcagatcttccggccatacttcttcagttttgaagcggcgggagaactggactaactgccagagatcgcttttcgcttcgcccggtgcctgtacctgttgacgccagaactgagtacggcgttcggcgttaccgtaagcgccctctttctctacccacattgcggtcggcaggatcaagtcggcggccagcgcactgactgtcggatacggatcggagacgatgatgaagttgcgcggatcgcgccagcccggcatacgctcttcattgatgttcggcccggcctgcatgttgttggtacacatggtccagtaaacattcagtttgccgtctttcagcgcacggtcttgtgccaccgcgtgcagaccgattttcgccggaatggtgccgctcgggatattccacttcttctcgcagatatcacggtgtttctcgttggtcaccaccatgtccgcaggcagacggtgagcaaaggtgcccacttcacgcgcagtaccacacgcagaaggttgcccggtcagggagaacggaccgcaacccggctgggaaattttgccggtcagcaggtgcaggttgtagaccaggttgttagcccacacgccacgagtatgctggttgaagcccatcgtccagtaggagatgactttcttgttcggatcggcatacagctgcgccagttgttctaactggtctttcggcacgccggtcatttcggcagttttttccagcgtatactcggcaacgaaggctttgtaatcttcaaagctcatcggttcggaggcgtcagaacccggattcttcgctgctttttccagcggatgggtcggacgtaaaccgtagccgatgtccgtcgcccctttgcgcaggttaacgtgcttgctgaagaagtcctgatttatcgcattgttttgaatgatatagttggcgatgtagttcaggatcaccaggtcagattgcggcgtaaagatgatgccgttatccgccagctcgaagctacgatgctggtaggtagaaagcaccgccacggtgacgttctggttagagagacgacggttagtgatgcggctccagaggatcgggtgcatttccgccatgtttgcgccccacagcacaaacgcgtcagcctgctcgatgtcgtcatagcagcccatcggctcatccataccaaaggtacgcataaagccaactactgcgctcgccatacagtgacgcgcgttcgggtcgatgttgttgctacggaagcccgctttaaacagcttggacgcggcataaccttcccagatagtccactgaccagaaccgaacataccgatgctttccggccctttttctttcagggcggttttgaatttctcttccatcacatcgaaggcctgatcccaggtgattggggtaaattcgccttctttgtcatatttaccgtttttcatacgcagcagcggctgcgtcaaacggtctttaccgtacatgattttgggcaggaaatagcccttaatgcagttcaggccacggttaaccggtgcgtccgggtcgccctgacaggccaccacacgtccctgctgcgttccgaccagaacgccgcaaccagtaccgcagaaacggcacggcgctttatcccatttgatggcttcctgctgaccaacaacggcgcgggcaacgcccggcacgctgagaccggcagccgccgcagcggccgcaacggcgttagctttcataaagctacgacgactgagtttcatggtgtttcctcaccttgctcttcctgctggtgataaaccaggctcaccgccagcacgccctctacgttgcgtacactctcaatggtttggatcagcgtttcgctgtcttctgcttccaccaccacaatcaactgaccgctcggcgcgtcgctgacagcaacttcacagccgggaaaggcgttcagttgggtgctgatgtcactaattcgttcgcttttggcctgcacgaccaggctgcaaacttgccagttagtgtgcatggagatactccgcagttatggcacttaccggacagctggctgcacatgctccacatccgttgcaaagttggctattaagttgcggctggtagatcccggagagcgtcgggcgaaagataattgccattggctcacagctatcctgacagcggcggcattcaacactctgatacgccaggcacgcgtccccgatggtgaactgcaaatcccaggccctggtgtggcgcggagaaaataggctttcggggcaagcctgcgcgcaggcgtaacagaagctgcactcgttatttttgaaattaacgctcggatagccgcccgcgccgcgttgcagaatgttgttttcacaagcattaatacaggcgtcgcagcgggtgcaatgggtcagaaaatgagattcatcaccggaccagggcggacggataccgttactggctttgcgccagcgaccagtgagtatgccccgacgggatgcatcaatcttcacattgaccttccatcattaacgcgctctgaaaattgagagcgaccaaataaaccgcataattaataagccatttttatagccgctaagatattaaaggatgtgtcaaagatgcataccccgatcggggtaaaacctgtagcaggatcaaaagagtggcgggaagcgtggcaaaaacgggcttttgctcacatttcaaatggttataaatatatttatatagcgattgattcaccagagatatttctgctggtttgctctctcattagaatttaacactaaaagagcaggtaaaattgtctgaatgttctttaagttattcataaagcaaattaataaatctgatgaatatgttaaccttcagcgacatcatcggtgaaaacctataaatgaagaaggaaagcaaaaaaatgaagaccattctacctgcagtattgtttgccgctttcgctaccacttccgcctgggcggcagaaagcgtccagccactggaaaaaatcgcgccttatccacaagctgaaaaagggatgaagcgtcaggtgattcagttaaccccgcaagaagatgaatctaccctgaaagtagaactgttaatcggtcagacgctggaagtcgattgcaatttgcatcgtctcggcgggaagctggaaaacaaaacgctggaaggctggggctatgattattatgtctttgataaagtcagttccccggttagtacgatgatggcctgcccggatggcaagaaagagaagaaatttgtcaccgcgtatctgggcgatgctggaatgctgcgttacaacagcaagctgccgatcgtggtgtatacgccagacaatgtagatgtgaagtaccgcgtctggaaggcggaagagaaaattgacaacgcggtagttcgctaaactgccgtgaagtgcggcaccccgtaggtcagacaaggcggtcacgccgcatccgacatccaacgcccgagccggttgcctgatgcgacgctggcgcgtcttatcaggcctacaccgctgtgaagtgcggcaccccgtaggtcagacaaggcggtcacgccgcatccgacatccaacgcccgagccggttgcctgatgcgacgctggcgcgtcttatcaggcctacaccgctgtgaagtgctccaccccgtaggtcggataaggcggttacgccgcatccgacatctaacgcccaagccggttgcctgatgcgacgctggcgcgtcttatcaggcctacaccgctgtgaagtgctccaccccgtaggttggataaggcggttacgccgcatccgacatccaacgtccgagccggttgcctgatgcgacgctggcgcgtcttatcaggcctacaccgctgtgaagtgctccaccccgtaggtcggataaggcggttacgccgcatccgacatctaacgcccaagccggttgcctgatgcgacgctggcgcgtcttatcaggcctacaccgctgtgaagtgctccaccccgtaggttggataaggcggttacgccgcatccaacatctaacgcccgagccggttgcctgatgcgacgctggcgcgtcttatcagcatacgccacatccggcataccatgccggatgtggcgtatcattacaacgcaatatccgccacttctttttgaacgggttgcggtttcaactgcggtttcggcgtactatctgctgcctgcggcttgtcgtagttcaaccccagcacttcgctggtgtactgcaactcgcgttctgttgccgctacatcaccgttcagcttgcgtccataagacggaacgatcgctttcaacgtagcctgccattgcgggctggaaacacgatcgccaaatactttttccagcagattcaacataatcggcgcggcggtactcgcccctgggcttgcccccaggagcgcggcaatggttccttgctggtcactgacgacttcagtacccagacgcagtacgccacctttctcggcatcacgcttgataatctgcacgcgctgccccgcttgccacaaacgccagtcctcttttttcgcctgcggatagtactctttcaacgcttcaaaacgatcctcttcactcaacatcacctgactcaccagatatttcaccagatcgaaattatccagcccgacgtgcatcatcggcatcacgttagaggtggtggtggaactcattagatcccacaaactaccgtttttgaggaatttggtactgaaggtggcaaatggcccaaacagcactacgcgtttaccgtccagaacgcgggtatcgatatgcggaacgctcatcggtggtgcgccaacggatgctttaccgtaaaccttcgccagatggtgattaaccacgtccgggttttcgctaacaaggaactgtccgcccaccgggaaaccggcgtagtctttcgcttccggaatcccgctttcctgtaacagcttcagcgccgcaccgcccgcgccgataaagacaaatttggcacgaatgttctgtgcagtgccatttttcagatcggcaacggtaacggtccaggtgttatcgtcattacgctttagggcgcggacttcgctgctgagttgcaggctgaagttagatttcttctgcaaggaagcaattaactggcgggtgatctcgccgtagttcacatcggtaccaatttccgtacgcgtggctgccactttctgttgcggatcgcgcccttccatcactaacggtgcccactctttgatctgcgcgtgatcttcagagtaacgcataccgcgaaacaggctgctttgttgcaacgcggcgtaacgggcgcgcaggaaattgacgttatcctcgccccagacaaagctcatatgcggaacggtattgataaaactacgcggagtacgcagcacgccgcgctcaacctggtgcgcccagaactggcgggaaatctgaaatgcttcgttaatggcgactgctttttcaatactgatgctgccatcggcgttttgcggggtgtagttcagttccatcagtgcagaatgcccggttccggcgttattccagccgttgctactctcctgcgcgacaccctccaggcgctccaccatggtcatgctccattcaggctccagctcgcgtaaataggtccccaacgtggcgctcataatgccgccgccaatcaacagtacatcagtttcctgctcctcggacgctttcgcttttgccgccatgctaacggcattaagccccacggccatgctgaagagcatggcagtcacttttttcatcttgttaatgccttacttttagtcgctttattgcaggtgagatttgcgcggcatcaacggtaacacttaagtaacaacatttaaataatgtttataaattatattctaattttagaaacattataatttcgttgattaattatagggttattagaaatgaagggatttttagcatattgacctgacggcagcagtccgccaggtcagcgtcgtaatattatgccgtccgggcaacggcatcacggctagcggcatcgcgctcttcgcccgtcagctcgctaagttgcccattgcgcatttccagcaggcggtcggcgtggataaagtaatgatcatcatgactgatagcgaaaatagttttacccatctcctgcatcagcggcagcaacacctgataaaactcacgacggaagtgtggatcctgatccgccgcccattcatccagcaggataatatcgcgttcttctgccagcgccagcaacagcgccacgcgttttttctgccctttacttaacttcaggttaacaatacgcccgttgcttaactcaagcttatgagccattttcagctgcgccagccacttctcaaccagttgcgggttagcgggtttaccctccggccccagcagttgatcaaacagccagacatcggtaaacactgcgctaaacagtttgcgataatcttccggttgttcgccgctgacaggtttgccatccagcaagatttcgccgctttgtggctgatacaagcccgtcaacaacatcgccagcgtgctttttccgctaccgttgccgccaatcagaaacagcagctcgccacgtttgatggtgagattaatcggaccaacggaaaacgcgttatcctgataagcaaacgtcacgttacgcagctccagcgtttgccagttgggaaacgcctgcgggcgcggaaactctgctttgaaaggcgcgagcgcgaatttgttcagcttgttaaacgccacctgcgccgtcagcagcgtcggcaatgcgccaaccgcgctaagcagcggcgtacgcaggaataaaagcgtcaagctataggtcgcggcaacgttggtatcagcccaaccgaggctgttcgccatccagaacaccaggccgattgcgcccagcatcatgatgttactccagttcacggcactaagatggaaggtgtctgcgcgaataatatggtggcgatactcttgcgcatcaggaatgtagaggttgttaaacacatactcggcgcgttcccggttcagagtcagctctttgcgcccttcaagtacagtttgaaaatccgtgtacagcttgtcttcggtttcacgcagggtcgccatatgtttgtacacccgcgccaccagcacaaaaccgccccagatggtgatcgccatccagatagccgttaccagcaacattttgccgctcagcatccacagatacgccgcactaccgatagtgagaatgatcccctgcaccagttccggcagacgcacaaaagcaatggtgatattgcgcacatcgctggttaaccccgccagcaagctggcgctaccgagttgttcaatgcgctcgacgtgagtatccagaatccgcttgataaattcactacgcagtcggtaaacgaagtgatgccccaaagtggtgagcgccagttggcttccgagagtgactgccatcaacagcagcaataatcccagaaactccggcaacaccagcagactggtatccgccgtttcgataaggcgctgattgataaaagcaattaagccaatgcctaatgccgcactggcgaggcttagcgccatcacactgataaatggccagcgatactgccgccagacaagtacaagaagttccatgcagaaaacccggacaatgaattacagcccgcagtttaaacatcttcgcgcgcacagcaataataattcttatttttattcttttttacctgcctgacggaatgtcaggttgtagcggcagtcgatggtgagtggatgaaaccccgctttcaacggttgaataccgtgataaaacagccggctttcaccgccccataccaccacatcgccatgttccaacaacaaacgtttgagcggatcatttcgtttcaggccgccaaattgaaaaatcgcgggtaagcccagagaaacagaaacaattggcgcgcgcagatccggttcgtctttatcctgatgcaggctcagtttcgcgccaggagcgtagcggttgataagacaagcatctggctggaaatctggatagcccgccgccgtagccgcacgttgacataaattatgaaaactctgtggcatggcgggccacggtttatttgtttgcggatcaatggggctatagagataaccttgccgatgggtcgtccagcccagatgcccacagttggtcatcgccacgctcatggtatatcccccgggggtgaccatctggcgaaacgggctctggctggcaacgtcattaatatcgcggatcagttgctccgcagcgttaaaagcaaaacgccgtaaaattaccgcaccagccgccagtggctcttgccacggttcagcatcggcaaacagatccaacattacctctcctcattttcagcttcgcggcgcagcagttgcgctttacggctcacgccccagcggtaaccggaaagtgtgccatcaccacggaccacccgatgacagggtattatgatagccagcttgttggcggcacaggcgctggcaacggcccgtaccgctttcggtttgccgatggcgttagccagttgctgataactgacggtttcaccgcaaggtatcgtgcgcagtgcctgccagacttgttgctgaaaagcagtgccgcgaatgtccagcggtaacgtcagcggcgtatcgcgttgattgaggctggcgatcacttcacgcacatgttgctgaaacatcagatcggcaggcgcgttgtcggcagcgggaaacatctgctgcaactcgctgattagtgtcgcgtcatcatcgcccagcaatatcgcgcaaatcccccgctcgctttctgccaccaggcaacgacccagctcacaatcagccagcgcgtaacgcaccgccagattttcgccaccgtgacggaattgtttagccgtcatgcccagcgtttcgtcagctttgcgatagtaactgctgctgtcggggaatccggcgttaagaatagacgtcgtcacgctctcccctttcgccaggctttcgcgcaaacggcgagcgcgccaggcctgttgccaggctttaggcgtcattccggtagtcgctttaaacaaccgatgtagatgaaatggactcatcgccacctggtcggctaaggcttccagcgttacaggcgtttcctgttccagcagtcgacacgcgtgggtgattttatccaaccgatgttgctgggcattggctttttctggctgacaacgtttgcaggggcgaaagccagcggcgagtgcctcgctggcatttgcgtagaaggagacgttttcccgcaaagcatgtctggcgcggcaagacggacggcaaaagatgcctgtggtacgcacggcgaaaacgaattcgccgtcggcattcgggtcgcgggctaagacagattgccagcgttgatcgtcagttaagcatgtggcttttttcataatcagctccctggttaaggatagcctttaggctgcccggtcaccatcacgcaaaaaccaacaatcttgcgctttaatttttttcgctgacaaggaagcttttaaactgtggactcatccaggttttaaagctatcgccttctttggtgatcatataaaccgccagcccttcccggcgaacaacctctttagctttctccggcccgagtaccatcaagccagtatcccaggcatcggcttccagcgccgtcggagcaatcaccgtcacggataccagattgtgttcgatgggacgcccggtttgcggatcgataacatgggaaagacgtttgccgtccagttcgtaatagttacggtagctgccagaggtgctaatcccatgaccgttgatatccaccacagcctgaaccgcgttttctttatcggttggtttttgaatcgctacccgccacggcaggccttcaccgttcataccacggctgttcagcgcgccgcccacgctcaccagatagcgggaaatcccttcctgctccatcaagcgtgccaaatgatcggccgcatagccttcgccgacggtggagagatcgacatataaatccggcaggtctttttgcagatattgctgatggctctgattgatgaccgtcaggtgctgtaagccggttttggctttcatcgcatcgatctgttcctggctcggaatttgaaccggctgttgttccgggccaaagccccacagattcaccagcggcccgacggttatatccatcgcgccatcggtcttcgcgccaatgcgcaggctggtggtgacgatatcggccatcgcttcacttaccggccacgggcttaaactttggctgtcgttaaagcgcatcagcgcggaatcttttttataggtgctaagcagctgatcgtcggcgtccagttgggtctgaatcttttctttaagttcggcgctgcgtttggcgtcaatgcccgggatgctggcacgccagaaggtacccatagttttgccttcaagaacggtaacttcagtagcgtgggttttggcgggttgtggtttttgatcgcaaccaacaaagaagagcgcggcagccagcagtgccacgcgggtaaagcttatttccatacgtgattatcctcatgcgaacggtcgcaagagtacaccaaaaaactgagtttgtacgctgaaaacaatgaaaaaagggcccgcaggccctttgttcgatatcaatcgagattagaactggtaaaccagacccagagctacgatgttatcagtgttgatgccagcgtcacgagtgaactggttgtcgtccagcaggttgattttgtagtcaacgtaggtggacatgtttttgttgaagtagtaggtagcaccaacatcaacatatttcaggatatcttcgtcgtcgtagccacgacccaggtttttacctttagactgcaggtaagccagggacggacgcagaccgaagtcgaactggtactgagcaacagcttcgaagttctgtgctttgttcgcccaacccagggaacctacgcgagttgcgttgtaggtctgggtgtactgagcagccaggtagatgttgttagcgtcgtatttcagaccaccagtgtaggtttcagcacggtcgccgttaccgatgtaagcagcggtgttctgagcatcagtacgtttggagctggagatcgcaccaccgataccgaaaccttcgtaatcataagtgatagaaccgccgacgccgtcgccgttttgacgcagtgcgtcacgaccgttgttagttacgccactagtaaagccttcaccagatgggttgccgtttttaccctggtactgaacagcaaagttcaggccgtcaaccagaccgaagaagtcagtgttacggtaggtcgcgaagccgttaccacgctgctgcatgaagttgtcagaaccgtaggtgtcaccaccgaattctggcagtacgtcggtccaggaagttacgtcataaacaacgccgtagttacgaccgtagtcgaaagaacccacatcctggaatttcagacctgcgaatgccacacgggtccaggagttgttttcgttttcagcgctgttgccctggatctgatattcccactggccgtaaccggtcagctggtcagtaacctgagtttcacctttgaagccaagacgcatgtaggtctggtcgccatctacatctttgttgtcagagaaatagtgcaggccgtctactttaccgtacagatctaatttgttgccgtctttgttgtaaacttcagcagcgtttgctgcgcctgctaccagcagagctgggaccaggagggacagtactttaactttcatgttattaaccctctgttatatgcctttatttgcttttttatgccactgcatactgattaaccctcattaatcagtcggcaagtccattctccccaaaaatgcagaataatccaacacgaatatgatactaaaacttttaagatgtttcatttatcgctatagatgtttcaaaatgtaaatgcaagggaactttttaagattattgcggaatggcgaaataagcacctaacatcaagcaataataattcaaggttaaaatcaataacttattcttaagtatttgacagcactgaatgtcaaaacaaaaccttcactcgcaactagaataactcccgctatcatcattaactttatttattaccgtcattcatttctgaatgtctgtttacccctatttcaaccggatgcctcgcattcggttttttttacccttctttacacacttttcattattctgtgctaccacagaaaaactataacgcttgttaactatttcacaaataattaacatccgcataatttccagcaatctttgtttatttgcaattatttttgttgggctttttgtaggttatttgtacagcaaaatggcgcttgtacatctatttcccccaatgcaggatgataaatatcacgggagaatagagaatcatcaatcaggtaagagtctggaatttcacactgtaccctttatactgccctatcacttcgcgaagttttaacaggtcataaacacgaatgcgtcagaaagagacaacggccacgacccgctttagtctcctaccggggagcattacccgcttctttttactgttgatcattgtgttactggtgacgatgggtgtaatggtacaaagcgccgttaacgcctggctgaaagataaaagttaccagattgtcgacattacccatgctatccaaaagcgcgtcgataactggcgttacgtgacctggcagatctacgacaacattgccgcgacgacctccccctcctccggcgaaggtttacaagagacgcgcctgaaacaggatgtctactatctggagaaaccacgccgcaaaacggaagcgttaatctttggctctcacgacaacagtacgcttgagatgactcagcggatgtccacttatctggatacattgtggggcgcagaaaatgtaccgtggagcatgtattacctgaatggtcaggataacagtctggtgctgatcagtaccctaccccttaaagatctcacctccggatttaaagaaagcaccgtcagcgacattgttgatagtcgtcgtgcagagatgttgcaacaggccaacgccctcgatgaacgcgaaagcttttctaacatgcgccgcctggcctggcagaacggtcattactttacattgcgtactacctttaaccagccaggacatctggcaacggtcgtggcttttgatctgccgattaatgatttgatcccaccgggtatgccgctggacagtttccgccttgagccagacgcgacggcaacgggaaacaatgataatgagaaagaagggacggatagcgtcagtatccactttaacagtacgaagattgaaatctccagcgcactcaactctaccgatatgcgcctggtctggcaggttccttatggcaccttattgctggatacgttgcaaaacattctgctgccactgctgctgaacatcggtttgctggcgctggcgttatttggctataccacattccgccatttctccagccgcagtacagaaaacgtccccagcacggcggtcaataacgaattgcgcattttacgggcaatcaatgaagagatagtcagtctgctgccgctcggcctgctggttcacgatcaggaaagcaaccgcactgtcataagtaacaaaattgccgatcatttgctgccgcatttgaatctgcaaaacatcaccaccatggcggaacagcatcaggggattattcaggcgacgatcaataacgagctgtatgagatccgcatgttccgcagccaggtcgcgccgcgcacacaaattttcattattcgcgatcaggatcgcgaagtgctggtaaacaagaaactcaagcaggcgcagcgtctgtatgagaaaaaccagcaggggcggatgatctttatgaaaaacattggcgatgcgctgaaagaacccgcacagtccctggcggagagcgcggctaaactcaacgccccggaaagcaaacaactggcgaatcaggcagatgtgctggtgcggctggttgatgaaatacagttagcgaacatgcttgcggatgatagctggaaaagtgagacggtgctgttctccgtgcaggatttaattgatgaagttgtgcctagtgtgttgcctgccatcaagcgtaaaggtctgcaactgctgattaacaatcatctgaaagcacacgatatgcgccgcggcgatcgcgatgccttacgacgtattttgctgctactgatgcaatatgccgtgaccagtacgcaattgggaaaaatcacccttgaggttgatcaggatgagtcctccgaagaccgcctgacgttccgcattctggacacgggagaaggcgtaagtattcatgaaatggataatttgcacttcccgtttatcaaccagacccaaaacgatcgctatggcaaggcggacccgctggcattctggctgagcgatcaactggcacgtaaactgggcggtcatttaaacatcaaaacgcgggatgggcttggtacacgctactctgtgcatatcaaaatgctcgcagctgacccggaagttgaagaggaagaagagcgtttactggatgatgtctgcgtaatggtggatgttactagcgcagaaattcggaatattgtcactcgccagttagaaaattggggtgcaacctgtatcacacccgatgaaagattaattagtcaagattatgatatctttttaacggataatccgtctaatcttactgcctctggcttgcttttaagcgatgatgagtctggcgtacgggaaattgggcctggtcaattgtgcgtcaacttcaatatgagcaacgctatgcaggaagcggtcttacaattaattgaagtgcaactggcgcaggaagaggtgacagaaagccctctgggcggagatgaaaatgcgcaactccatgccagcggctattatgcgctctttgtagacacagtaccggatgatgttaagaggctgtatactgaagcagcaaccagtgactttgctgcgttagcccaaacggctcatcgtcttaaaggcgtatttgccatgctaaatctggtacccggcaagcagttatgtgaaacgctggaacatctgattcgtgagaaggatgttccaggaatagaaaaatacatcagcgacattgacagttatgtcaagagcttgctgtaacaaggtagcctattacatgaacaatatgaacgtaattattgccgatgaccatccgatagtcttgttcggtattcgcaaaagtcttgagcaaattgagtgggtgaatgttgtcggcgaatttgaagactctacagcactgatcaacaacctgccgaaactggatgcgcatgtgttgattaccgatctctccatgcctggcgataagtacggcgatggcattaccttaatcaagtacatcaagcgccatttcccaagcctgagcatcattgttctgactatgaacaacaacccggcgattcttagtgcggtattggatctggatatcgaagggatcgtgctgaaacaaggtgcaccgaccgatctgccgaaagctctcgccgcgctgcagaaagggaagaaatttaccccggaaagcgtttctcgcctgttggaaaaaatcagtgctggtggttacggtgacaagcgtctcagcccaaaagagagtgaagttctgcgcctgtttgcggaaggcttcctggtgaccgagatcgctaaaaagctgaaccgcagtattaaaaccatcagtagccagaagaaatctgcgatgatgaagctgggtgtcgagaacgatatcgccctgctgaattatctctctagtgtgaccttaagtccggcagataaagactaatcacctgtaggccagataagacgcgttagtgtcttatctggcatttgcaccgattgccggatgcggcgtaaacgccttatccggcctacgattcccattatttcaacaaattacattaaagtaggccagataagacgcgtcagcgtcgcatctggcatttgcactgaatgccggatgcggcgtaaacgccttatccgtcttagctatcccggcttttcctgaccctctcggcatataacgtcagcgtctgttttatcacatccagcgttaccggcttgctcaggcagctgtccataccggactccagacaccgctgtttctcttcagccaacgcattagcagttactccgattaccggcaacgtcagtcccaactgacgaatgcgttgcgtcaagcggtaaccatccatatttggcatgttgacgtcgctaagcacgatatcaatatgattcttgctaagtacattaagcgcatcgacgccatcattcgcggttttacattgatagcccaagcttcccaactgatctgccagcaaacgccggttaatcggatgatcatccacgaccagaatcatcatatcgtcattatcgctgaccgctttgtccgtactcggcagagcgttagcaggatcgtcgctctccatctcgatcaaataaatacgcgccaacaatgccggtagctcatgcggagcagccacactgtgtacccactcccctggcgctttctccagcggaataccaatatggcgacgacagaaggtcactaccgctctgccctgccattttttactcactacctcgtcagtgatcaacacatcttcgggagtcggttcctgcccttcgtatgttgtaacgacgatgccgctgcgctgcaaactggtttccaggaactgacagaggctcgcattgcggaccgccagccagcagcgtttaccactcaacccttccacgccttttttctgcgggtactgagcgccgtacaacggaatacgcacggtaaactggctgcccattcccggttcactatctacgctgatatcgccgtccatcatgctgatcagtttttcacaaatcgccagacccagaccggtcccctggaaattacgctgtacgcccgttccgacctggaagaagggatcaaacaagcgcaccacttctttcgccggtatccccacgccggtatcgcgaacacggatagagagataatcgccatccgcgcgaacatgcaaaactatacagccggtatcggtgaattttatggcgttactcaacaggttggagatgacctgctgtaaacgcatcgggtcgccatttaaggccactggcacatccggttcaataaagcagtacaagcctaactgcttgcgtaccaccagcggtaaatagttggcggtgatgtggttcatcacttcacgcggactaaactcacgcggttcgatcttcaactgttcgctttcaatcttgctgaaatcgagaatatcgctgataattttcaacaacaggctggaagagttgttcattgccgtcaccagccgatcgacgcctttcggtaactctttggtttgcaacagatccaggttaccgataatgccatacagcggcgttcgcagctcatgactgacggtggcaaggaacatgcttttactctggctcgcctgttccgctgcttgtgccatctcctgcaagctctcttccatcttcacgcggctagaaacatccaccagcacacaaatggccacgttttcattacgatagcggctatggacgaagctgatttgcagattggtattgttgctggtcaggacatcaacaaaattgacctgctgcccacagataatttgcgtcagtcgttggcggtcctcatgcgtaagcatattgagataggtatgcgccagttcgttacttaaaatattgacgccatcagcggtacgcaaaatgcagatacccactggcgcggaggcgacaatcttgcgattgaactgctcatgttcttccagtcgcagggcgtcgctttccgccggaatgaaaatacgtcgctcgtacatccgtgcgagagtaaacaatgcagctccggcaagcacattcagcaaaattgcgttaaggatcaacatgcgaatgcgttccagcaccttatcaaccggcacgctatacacgatgcttaggctactgggtggcagatttttcttcagcaccagctcccggaacccttccgtatagccaaaccaggagcgttcctgcatccagcgaggatcgcccttaattttactttctggtccggtaaggctaatcagggtatgaccattttcatcaagaatggtaacccccatcggcaacgtacccggtaagaaaaagttctccatccggatggtctgctcgacacccaaaagcgcctgcaaccggttcgccagataaactggcgtcaacgcgtaaaaatacccgacgccagggcgcggaccttcgctgatccagtagaggttactgccgctatcatcttgtggtgcatttcgatatttattgatgcgttcatgcaaagctttcaacgcggtatcgcgttccactggcatatcacgcagaccgaaattggccatgcagaggttatcgctgccgattaaaaatacccggtttagatcgtaagccgcagaaaaattatcgcgccagtagcgcataaaccacgccaaactctccagagaacctcgccaggtgttactcattgcggaacaatcggagtcggcaaacagcggttcaaacgcaggcacatccgcctgcgtttctcgtccacgcggggaaagcacaccgttttctgcgcttaagcgattttcggcgatgtacttcagctctttcatcacatcagaggtgcgttgaataaagcgctgagcctgatcggaactcagattaaattcctgacgaatttcgctttctcgctgatgtaacgcattaacgatgtaaaaaacggaactaaaagcaatcaacagccagagcactaacgccaatgctctgaacatgtagcggctggctttcagggttgtacgaaaagaagcaaggtatttcaaaggggcgaagctccgcctcaggtgaccgatggagtgtggttaaggtagcggtaaaagcgtgttaccgcaatgttctctcttctctggaatatgatacaccgccgagaaatcatcaccttaacctctgataatcgtcatataccggacaagactagtggatttcagcatgcattatatgaagtggatttatccacgccgcttacgcaatcaaatgatcctgatggcaatcctgatggtcattgtcccaacgcttactattggttatatcgtagaaacggaaggacgtagtgcagtcttatctgaaaaagagaaaaaactttctgccgtggtcaacctgcttaatcaggcactaggcgatcgctatgatctctacatcgacttaccacgtgaggagcgtatccgcgcattaaatgcagaacttgcccccattaccgaaaatatcactcacgccttccctggcatcggtgctggttattacaacaaaatgctggatgcgataatcacctacgcgcctagtgcgctatatcagaataatgtcggcgttaccattgccgcagatcaccctggtcgcgaagtgatgcgtacaaatacccctttagtttatagtggcaggcaggtgcgcggcgatattttgaatagtatgctccccattgagcgtaatggtgaaatcctcggctatatctgggccaatgaattaaccgaagatattcgccgccaggcctggaaaatggatgtgaggattatcattgtgctcaccgctggtttgctgataagcctgctgttgattgtccttttctcccgtcgcctgagcgccaatattgatatcatcaccgatggcctcagcactctggcacaaaatattcccactcgattaccacaattgcccggtgaaatggggcaaatcagtcagagtgttaataacctcgcccaggcactgcgtgaaacgcggacacttaacgatctgattattgaaaacgctgccgatggcgtcattgccattgaccgccagggtgatgtaaccaccatgaacccagcagcagaagttatcactggctatcaacgccatgaactggtagggcagccttactccatgttgttcgacaatactcagttctacagtccagtactggatacgctggaacatggcaccgaacatgtggcgctggagatcagttttccaggtcgtgaccgcaccattgaactcagtgtcactaccagtcgtattcataacacgcacggtgaaatgataggtgctttggtgattttctctgatttaactgcccgcaaagaaacccagcgccgcatggcgcaagcagaacgcctcgccacactgggtgagctgatggctggcgtcgcgcatgaagtacgtaatccgttaacggctattcgtggttatgtacagatcttgcgccaacaaaccagtgacccaatacatcaggaatatctgtccgtagtactcaaagaaatcgatagtattaacaaagttattcagcaattgctcgaatttagtcgtccacgccacagtcaatggcaacaagtcagcctcaatgcattggttgaagaaactctggtactggtacaaaccgccggcgtacaagcgcgggtcgacttcataagcgaactggataatgaattaagcccgattaacgccgatcgtgaactgctcaaacaggtactactgaatatcctgatcaatgccgtccaggctatcagcgcacgagggaaaattcgcattcaaacctggcaatacagcgacagtcaacaggccattagcatagaggacaacggctgtggcattgatctcagcctgcaaaaaaagatcttcgatccctttttcaccaccaaagccagtggaaccgggcttggtctggcgttaagtcaacgcatcattaatgcccatcagggtgatattcgcgtcgccagtttgccgggctacggcgcaaccttcacgcttattttaccgatcaacccgcagggaaatcagactgtatgactgctattaatcgcatccttattgtggatgatgaagataatgttcgccgtatgctgagcaccgcttttgcactacaaggattcgaaacacattgtgcgaacaacggacgcacagcattacacctgtttgccgatattcaccctgatgtggtgttgatggatatccgcatgccagagatggacggcatcaaggcactaaaggagatgcgcagccatgagacccggacacccgttattctgatgacggcctatgcggaagtggaaaccgccgtcgaagcgctacgctgcggagccttcgactatgttattaaaccgtttgatctcgatgagttgaatttaatcgttcagcgcgctttacaactccagagtatgaaaaaagagatccgtcatctgcaccaggcactgagcaccagctggcaatgggggcacattctcaccaacagcccggcgatgatggacatctgcaaagacaccgccaaaattgccctttctcaggccagcgtcttgattagcggtgaaagcggcaccgggaaagagttgattgccagagcgattcactacaatagccggcgggcaaaggggccgttcattaaagtcaactgcgcggcgctgccggaaagcttgctcgaaagtgaactgtttggtcatgaaaaaggtgcatttactggtgcacaaaccttgcgtcagggattatttgaacgagccaacgaaggtactctgctcctcgacgaaattggcgaaatgccgctggtactacaagccaaattactacgcattctacaggaacgggaatttgaacggattggcggccatcagaccataaaagttgatatccgcatcattgctgccaccaaccgcgacttgcaggcaatggtaaaagaaggcaccttccgtgaagatctcttttatcgccttaacgttattcatttaatactgccgcctctgcgcgatcgccgggaagatatttccctgttagctaatcactttttgcaaaaattcagtagtgagaatcagcgcgatattatcgacatcgatccgatggcaatgagtctgcttaccgcctggagttggccgggaaatattcgagagctttccaacgttattgaacgcgccgtcgtgatgaatagtggcccgatcattttttctgaggatcttccgccacagattcgtcagccagtctgtaatgctggcgaggtaaaaacagcccctgtcggtgagcgtaatttaaaagaggaaattaaacgcgtcgaaaaacgcatcattatggaagtgctggaacaacaagaaggaaaccgaacccgcactgctttaatgctgggcatcagtcgccgtgcattgatgtataaactccaggaatacggtatcgatccggcggatgtataacaccaaaacttgctatgcagaaatttgcacagtgcgcaattttctgcatagccgctcattctccttataaatccccatccaatttatcccttcatattcaattagttaaataactaaatccaataatctcattctggcactccccttgctattgcctgactgtacccacaacggtgtatgcaagagggataaaaaatgaaaacaaaattgatgacattacaagacgccaccggcttctttcgtgacggcatgaccatcatggtgggcggatttatggggattggcactccatcccgcctggttgaagcattactggaatctggtgttcgcgacctgacattgatagccaatgataccgcgtttgttgataccggcatcggtccgctcatcgtcaatggtcgagtccgcaaagtgattgctagtcatatcggcaccaacccggaaacaggtcggcgcatgatatctggtgagatggacgtcgttctggtgccgcaaggtacgctaatcgagcaaattcgctgtggtggagctggacttggtggttttctcaccccaacgggtgtcggcaccgtcgtagaggaaggcaaacagacactgacactcgacggtaaaacctggctgctcgaacgcccactgcgcgccgacctggcgctaattcgcgctcatcgttgcgacacacttggcaacctgacctatcaacttagcgcccgcaactttaaccccctgatagcccttgcggctgatatcacgctggtagagccagatgaactggtcgaaaccggcgagctgcaacctgaccatattgtcacccctggtgccgttatcgaccacatcatcgttagtcaggagagcaaataatggatgcgaaacaacgtattgcgcgccgtgtggcgcaagagcttcgtgatggtgacatcgttaacttagggatcggtttacccacaatggtcgccaattatttaccggagggtattcatatcactctgcaaagcgaaaacggcttcctcggtttaggcccggtcacgacagcgcatccagatctggtgaacgctggcgggcaaccgtgcggtgttttacccggtgcagccatgtttgatagcgccatgagttttgcgctaatccgtggcggtcatattgatgcctgcgtgctcggcggtttgcaagtagacgaagaagcaaacctcgcgaactgggtagtgcctgggaaaatggtgcccggtatgggtggcgcgatggatctggtgaccgggagccgcaaagtgatcatcgccatggaacattgcgccaaagatggtagtgcaaaaattttgcgccgctgcaccatgccactcactgcgcaacatgcggtgcatatgctggttactgaactggctgtctttcgttttattgacggcaaaatgtggctcaccgaaattgccgacgggtgtgatttagccaccgtgcgtgccaaaacagaagctcggtttgaagtcgccgccgatctgaatacgcaacggggtgatttatgattggtcgcataagccgttttatgacgcgttttgtcagccggtggcttcccgatccactgatctttgccatgttgctgacattgctaacattcgtgatcgcgctttggttaacaccacaaacgccgatcagcatggtgaaaatgtggggtgacggtttctggaacttgctggcgtttggtatgcagatggcgcttatcatcgttaccggtcatgcccttgccagctctgctccggtgaaaagtttgctgcgtactgccgcctccgccgcaaagacgcccgtacagggcgtcatgctggtcactttcttcggtagtgtcgcttgtgtcatcaactggggatttggtttggttgtcggcgcaatgtttgcccgtgaagtcgcccggcgagtccccggttctgattatccgttgctcattgcctgcgcctacattggttttctcacctggggtggcggcttctctggaagtatgcctctgttggctgcaacaccgggcaacccggttgagcatatcgccgggctgatcccggtgggcgatactctgttcagtggttttaacattttcatcactgtggcgttgattgtggtgatgccatttatcacccgcatgatgatgccaaaaccgtctgacgtggtgagtatcgatccaaaactactcatggaagaggctgattttcaaaagcagctaccgaaagatgccccaccatccgagcgactggaagaaagccgcattctgacgttgatcatcggcgcactcggtatcgcttaccttgcgatgtacttcagcgaacatggcttcaacatcaccatcaataccgtcaacctgatgtttatgattgcgggtctgctgctacataaaacgccaatggcttatatgcgtgctatcagcgcggcagcacgcagtactgccggtattctggtgcaattccccttctacgctgggatccaactgatgatggagcattccggtctgggcggactcattaccgaattcttcatcaatgttgcgaacaaagacaccttcccggtaatgaccttttttagttctgcactgattaacttcgccgttccgtctggcggcggtcactgggttattcagggacctttcgtgatacccgcagcccaggcgctgggcgctgatctcggtaaaagcgtaatggcgatcgcctacggcgagcaatggatgaacatggcacaaccattctgggcgctgccagcactggcaatcgccggactcggtgtccgcgacatcatgggctactgcatcactgccctgctcttctccggtgtcattttcgtcattggtttaacgctgttctgacggcacccctacaaacagaaggaatataaaatgaaaaattgtgtcatcgtcagtgcggtacgtactgctatcggtagttttaacggtagtctcgcttccaccagcgccatcgacctgggggcgacagtaattaaagccgccattgaacgtgcaaaaatcgatagtcaacacgttgatgaagtgattatgggtaacgtgttacaagccgggctggggcaaaatccggcgcgtcaggcactgttaaaaagcgggctggcagaaacggtgtgcggattcacggtcaataaagtatgtggtagcggtcttaaaagtgtggcgcttgccgcccaggccattcaggcaggtcaggcgcagagcattgtggcggggggtatggaaaatatgagtttagccccctacttactcgatgcaaaagcacgctctggttatcgtcttggagacggacaggtttatgacgtaatcctgcgcgatggcctgatgtgcgccacccatggttatcatatggggattaccgccgaaaacgtggctaaagagtacggaattacccgtgaaatgcaggatgaactggcgctacatagtcagcgtaaagcggcagccgcaattgagtccggtgcttttacagccgaaatcgtcccggtaaatgttgtcactcgaaagaaaaccttcgtcttcagtcaagacgaattcccgaaagcgaatagtacggctgaagcgttaggtgcattgcgcccggccttcgataaagcaggaacagtcaccgctgggaacgcgtctggtattaacgacggtgctgccgctctggtgattatggaagaatctgcggcgctggcagcaggccttacccccctggctcgcattaaaagttatgccagcggtggcgtgccccccgcattgatgggtatggggccagtacctgccacgcaaaaagcgttacaactggcggggctgcaactggcggatattgatctcattgaggctaatgaagcatttgctgcacagttccttgccgttgggaaaaacctgggctttgattctgagaaagtgaatgtcaacggcggggccatcgcgctcgggcatcctatcggtgccagtggtgctcgtattctggtcacactattacatgccatgcaggcacgcgataaaacgctggggctggcaacactgtgcattggcggcggtcagggaattgcgatggtgattgaacggttgaattaatcaataaaaacacccgatagcgaaagttatcgggtgttttcttgaacatcgacggcgaaggtaaccccattaatcaccagtcaaaacttttcaccagcgtcagctcgccagcattacgcatcggtacaataaatgtttcctgtttctcattgacgcttccttcatcggtgatcagcgtcagttgggcggtggttaattccgtttcgctgcgcccaccatagtagttgatatacacctgatagcgcccgtgaattggcgcgggcatggcgaaaatctcgggtccgtaccccgtcgtgacatccatatccagtgcaccactgtttttcagcacggtgttaccgtaccaggcgtgttcgccatcgggcgtaacaacgtgaaggtcgaggtcggtattgtccgtatcccagctgagaaccagccgtaaacgtgcacgaatcgttcctgtacccggcgtactgtaaaactgcattttttgtcggctttgcccatccgggctgatgacctgcacgctgttgctgccttcagtgaaaatataagggcgtgcaaaactaccatcggattcaattctctgcggcatactggcaccgttgaccaccagccggccctgctgaactttacccgccgcagcataattctttattttgccgcggatctgcgcactgatattttgatcatctgccatgttgacggagctcgccgggtaattgatgctttgactaaaactggcatcttcgccctctgccggatgccagccactgagcggtgcatcaatctcgacttcctgcacaccttcactgtgagcgacagggctaagcgccaccagtaacaacggaagaaaaatctttcgcatagcattagtccattaataattgtcgggtcagcgtttcgatatagttctcatcaagcccggtgggataaccatcaaaggccaggtgcagatactcatgggttaaatccagccgatcctgaagcgtaaagaagttacgaataaacagccgtttctgctgccgatcggtataggggaaaccactgactaaacggcaaaccgcaaacacgtctggttcgttgtaccccgtctcagcttgtaatatacgccgccactgcggcatttttttcgccagccaggctttcgctttgggtaataactggcaggtactgcgtggcgctccccagcggctaagactgttgtcgggataagcaaacgcgagtatctgatcgtaacgctctccctgccccgcctgggccgtggcttgccgccaggaaagtgtcccttcggtagcgcgactgccatgataatgaaccggatcgcctgcatagatgagatcctgcgtccaggcggtcatcgttcgcgcccccgtggtcgctgggctagcagaaacacgctgcgtggcgctgctgtcggggatggtcaggcaatcgccttcccgattggcgttttgctgtaaaaaagtgcgaatcgccacggtcatggctttcgctgcctcagggggcgtacttttcgcctcgcgatccagaactctggcaacgtactcttcacgatcgagatggctctgcaatttcagtttgcccttttcgctcagtaaggtcgtctcaccgtggctgacaaacgtaatgtggttaccattagtaaacgtcacacgatagcgcccattaagtacgccgggatttactgccgtcgtactcttttccgctgtgattttcttcagcggatagcgggcaaacagctccacctctacacattgcccactggcaacctgcgtcggcactggcaaaacccgattaagcaccgtcgcataacgggttagtaccgttttgctggtgccactgccagtaacccacagcggtgtaccatcggttaaccagccagcaaaaccaccctgacggatttcctgtttatcatcggcaaaccagctccaggttttcacccgtacccgactaccgagcatggatgcgacaccgattttcgcctcgtccagcaccacatccagtaagacttcctgagctttgttttgcgcgggtaacgtcgctaaactatcaagcaggcttttaaccgttacgctggtttctggcttcagcgtagtcagagacgctaaccacgcaggtgcctgacgctgttgccagtattgcccccacacatctgcgccaatatgcaaccgctgcggcgcaaaatagagcccacaggaacgtaccagcgcggtatcgcgcgttatgctctccccagcctgacaacaataaacctcttccggggagtttccgcgacactggtagggctgctccggttgatgggtatcctccagccaggcgtaaacatacagtttccacaaactccctaacggcgtggtgaggctgtcaggtaatgcactgactttggtcacgccactactgctcagctgatacagttgatcgtgctgcgcaccgcgcagcaccagttgtaacggcgtctcctccgcaagtgttggcagagtaaccaacgccaatagccagacgattcagcgccagttcacttatttcacctgcatcccggtccattcactccctgccgcaacactttgctgcgcaggtgcataggaacgcacataacgagcaggaggcagaacgaattgccctttttgcgagaagcgcagcaaatggcggaaagtgaccgttcccgtcagttctttcaccggcaccatataggccagttcgcccatttcatttcgcgctttttccagcaattgcccctgctgtttcgcggcgttgggtttattgaccgaaatgccccatgttgtgcgctcaacgtcggctcccggtggcagcggtacttccacctgaccgtagcgcagaactgcatcctgctcgctggtaagcgtgatttcatcgagatacagcgcatcgctgtcaatctcattgctggtcaccggttgcagaataaagctcatctcttcttcaccagggataagccgatacaactggcgttcaacggtcaccggaatgttactttgttgagccatttttgccggctcacgtcagcggacctgcacattttgcggcgataattcgtcaccaaaagagagaatgtccggcacgccctgaccaacccaacgccagtcttcgccccctccagttaacttatgtttagcccatgcgcccgcaggcgcaggcaaaacaactggaggcattgtcgccatatatttcgccagccagttcatggccagcgcgcgctcaatagtggattgctcagcggtcaaaccacttaaaatagcggccgtctgggtagcgtcgccaccgctattaagcagcacaaccgtgtgcgccagcggctgattgctgtttgccgctttatcccacgcatattgctgaacctgtggcatcaccgtggacttcaactgcgcttttttcagcaacgtcatggttaagacgtttgccaccgcatctgccagtggagactccggtgtatcgaggatcaggctatcattgatatcgcgggtgtcttcctcagagaaatcttcagttttagttccgcgccgggcgatagcttcatccaaccctttcaacaacgttttgcacggcaaattcatctcctgcgcccatgccagcaccagcgcccgatgcaataacggcatgttatctgcctgctccgcgtagctgtcgagcatatgctgccagtattccggttgttgcgttacgccgatcgcctggctggcctgccagtcggcgtaccatgcccatgccgtaaggaaggcgtcaccattgccatcttcaccccaccaggtaaagcgcgctccgggccccgccagttgcatcagccgcagacggttatcctgaatcatctgacgaatgtcgttagcggcggcactttgatgatcggcaagcgaacgccaggcgagactgagcgggatcagacggctaccggtgttgattacgccaccccacggttcatcgactaacgcatcaagattgttgcggaaaatctcctgcggcgtttcactactttgtagccggatattgctcgcctgctcgggcaacatcagcgcgttatcgccaccaccgagcatgacatttttctgctgttcaacgggccagctgttatccacaaaagacagttttgtgctaatgctgtcctgcacttgcccattttgttgcagttctgcacttaacaagccagattgctgaatattctgcgtcagcgaaatataattcgcccctttgtgcagcgtcagcgtctggcgcatctcagcgcctgcaaatttagtcaccagcgccaccggttcgttatcctgctgactgaagataaatagtcctgccgccggtttgtcgcccacgcgatacaccgttggcatactccacttcatgtagagatttttttccgaacgcagataagcacgcccctgcccgaccagcccgtcgccgttcatcccacgcgcggtgatacgccagcgggttaacgaatcaggcatcaggaacgtgaaatacgctttgccttgtttatcggttgtgagtgacggcatccatgccgcggtatccacctcttcacgccgtggacgttcaagcatttttactcgccgctcgctgcggttagttgcgccaggcgcaaccggctcgctggagagcgcctggtcgtagctgataaacgacagactggagctggtacgcacattgttacgccccagcggatagaaaaatttgccgatattcggcgcgatttctggttgcagcgcgtagatcatttcatcgaccacgcctaccgttagctgcgcagaaacaggtttacctttcagcgacgaggttaattcgacattgaccagttcaccaggctggtaatgggttttgtccgttttcacccggatatccagctggggaacggcaactttgatcccggcgttctgaaaactgtactgaccgttacgggtatacagcaccgaaaaagtgatgttaggcgcaaaggaattgctcactggaacccgggcttcatactgggtatcgtttaaacgttgtagcgttagccagtttgccggatgcgaaagcagcgactgctgttccacgcgatcgcgttccagcgtcaataatgcttcatcaattggctccggaaaggtaatcagcatcttcgcggtttcgcctggctggtacagcgttttatccgccacgatatctaccgtaccagtatgcgccgtgctgcccttaccgctgacggcatgacttaacccagcgagaattaagccgtctttatcgcgtaatgtcagattgtagttgccaggtttagcgaaattgacggtaaaggatttgccgcctgacggtagctctccgctatggctcgtgcggtcttcgagacgcaaccattcatacgtaacaggaacctgttttgaagattccagcgcggcataacggaacacaaccgactcgccgctattactgtattgtgcggcagtacttaatgagtaatgcgccagaccgcgttcaatgaggatctctttggtggtggtgacgcgatacgccgcgccgtcactggcggagacggttaacaaatagcggctcggtttatcggcggcggggagatttaacgccacatgaccgctggcgtcggacaccgtttcgctgccttccagcgacacggggaaacgtccggcataacgcaaatcgttaccgaccattgataattgctgagcgcgcaaacttaactgcacgcgggcattttttaccggctcgccatccgggtagagcagttgcagtttgccgctgaccgcttcgccagttttgaactcttttttggcgagagctaaaccaatctcgaaatgtggcttgatgtagtttgccacgcgaaaactgctgctatagacctgattgcggtaagcaagacgtaactcataacctccggctacgacattttctggcaggcggaaacttccctgcccgccattgcgcgcatccagcgtgacattgacggtttgcaacagactgccgttggcgtccagcaccgaaagcttcgccggggcgctgacgatgggggatgaatgcaacggatcgtggaactcgcggccgatcactttaacatcgacacgatcgcctgcgcgatatagcgggcgatcggtaaaaatatacaagcgggtgttgtagatttcgctttcgtagaagaagttctcggagacaaaaacgccgccttcagcatccttacccagaatgtatgaacgttctggcgatatatgttgtaactgcaaggtaccgctgtcatcggtcacaccgcgggtcatcacgccaagaccgtcagtccacaagatctctgagccgggcttcgcttcaccctgttttttacccgcggtccacaccagaagctctttgcctgacactttgctaagcgccacggtatcggaaacaaacaccaccgtcgtcgcccgatacccaccaaccatcgcctcgacgaggtacagtcccggctcttgttggccgagaggaatataaatgttacccggctgcggcgagatgaaattgctggatgcgccttccagttttaccccttgctgcggctcgaacggtttagcctgccatagtggataacggaactgtttcaccaggggatattttttcagcggggaaaactggttgttctgtacataacgggaaggtttaataatggcattgccgagctgtaattcgggtaacgcctgagtcacattctgccgtgactgagaagagaaagtacgctgcatcacgcggcgagatttgccgtaccagttatcccacagccaggttagcgtattgttcagcccgtcgcccagatattgcggttgcaccacaatgcgatgcaggtttttctgctggcgcaaaaatgccatcgggtcaggaatacgatacaggcgaacgtccacgccgccgtactcttccatctgatagcgccgataatcacgccccggcgcttccagtcgcactttcgcctcttcactgctgctaaaactgctgtcagcaagcaaaaagaatgttcccccggcaggcggcgcatagttgctggaaggaagcgaatcatcagcattagcaagccctgttcccacaagagacagggacaagcacgctgttatcgcgccagaaaatttaaacgataaatgccaatgaaattgggattggaatcgttgggtatccatcgggtgtccttccatgtcataagttgttgcagactgactgcgcgcattccgttgtcagttttcgtggcgcttccggtgtggtagatgacgtaacgccccatccagaccattaagtgctgggcatcgccctgatcgaaaaaaatcatatcgccaggcagcgcctggtttatgtcctggccaataaactggctgttgtactgaatcaaattaatcgcggtcacataggggccggttttcccgttcccctgattccagttttgcgccagttgacgctgttcaggtgttagcgtcatctctggcggcaaatactggctagataaaccgttactttttagccatttactgtcgtgaactttcagcgtctcgttcgccgcaaatcgcaccaggcccgcacaatcctgctgataccagcgtggacttggcccctggcggagctgttcttgtgcaatgcgtacaaaccaggcgcgaaacagcccggattgttcgacattcagcatttcgctatgggcaacaacacaacacagccagcaaatcagcgccagcagcccgtgcctcatagcggctgccaggttatgggtagccactgccaggcggcaccgggttccatctgggccagcttcatgacataacgcggttgttgagataaagcgtccagcttcggcattaataaagtttgtgcggcgttataaaaaaccggttcgagattcttcggcagactggtcaacgtttcgttacgcagcagtttcgctattccttgtggattgatatagagcggaacgatgccatcagtgggtattacatccaccattgccgggcgggttttattcagtgtttgcagcgcgttattaaccagcgtgtcatcgagggagaaaagcagcgttttgttttgcatcgccaggctcacacggaaaaaataatcgctcattaattgatcgggttgcgccgcctgcgctttcggatactggccgtatcgggaactcacttcgcgacgccagatttgcgcttcgccctgctgagtctggcttaccggcaaaacaccttctggcgctttgctttcgtgcgcaccaatattttgcgtaaacagtttccctggcaattgcgcctgttcggcagtgccatcaaactgaccgacaaacagcggggtttgcaatttactgtcttcataccagcacagccccgcggcaccgtctaacgccccattcagcttgtcgttttcctggctgatgtggctaagcatctcttcggcaataccgtgactatacggcaccgccacacagaagctggctccggcaggcatactgttccataccggcgtaaaatcgaaactggcatctacgctggcggattcatcatttaacgccacaaaactgtgccagccgtcgttacccatttcgaagcgtacgccagcaaaagaaggcattaaccgctggtagccaaaccccagccacctggcgctgactacgatgcgctggcgtactggcgttttttcggcagtacgctcttccaggccaaagcttgcttgccagcgttttttgccgctcaacaaatcacctgcgatcgccgtggcttcggtatcctgctgatcatctttaaacaacatatccgtgctggaaaacaccagcatcttgtcctgataagtcgcgaacatcagggcgttattgccgttatagcgcaactgataaacaggaacagtttcactatttatcttgatgctactgatttccgttttgcttaactggctgtcgctggtagcggcaaacaacaatggctccagcagtttgcttaaaccactgcgctggatcagcaccatataatgactaagatggccttgtttatcgtgccacagcgctgcctgcgcgggctgatctaagagactgctaaagagcttatctttcagcgtgagatcgtgttcatagacaatacgacgaatgctgccttcaatgcccagacgatcggcatgattctgataatagaaaacgaaatcttcgctcagaacatcgtggagaaacggaatggtgaggagatctttgggaagctggctcagagagtcgctgtcgagaaagaggtccggctcattgagatcgatttgcagattgttgtgcaccaccagcgggctcaacgttttttctggcccactgccagcatattgcaacgcccagacgccagcggaaagcagtgctattgcgccaaaacctacaagaccatagaaccgccagcctttcgccttttttcaccactcattgccacattccttgtgtatagccagccattttttacgggcacagccaaactttaccgtgccctaatacgacaaaagcccagactttgcagcctggacttttcaattcaaacaagggagatagctcccttttggcatgaagaagtaaaattattcttcttctggctcgtcgtcaacgtccacttccggagcgatttcatcgtccccttccgcggcactgccgtcgatggtatccagatcttcctcgtcaaccggttcagcaacacgttgcagacccactacgttttcatcttccgcagtacggatgaggatcacgccctgggtgttacggcccacgatgctgatttcgctaacgcgagtacgtaccagcgtaccggcatcggtgatcatcatgatctggtcgcagtcatctacctgtaccgcgccaacaactaaaccgttacgttcggtaaccttgatggagataacccctttcgtcgcacggctcttggttgggtattccgccactgcggtacgtttaccgtaaccgttttgcgttgcggtgaggattgcgccatcgccacgaggcacgatcagagagacgactttatcgccttcacctaagcgaataccgcgaacaccggtggtgttgcagcccatcgcacggacagaagactctttaaagcgcaccactttaccttcagcggagaacagcattacttcgtcttcgccgctggtcaggtcaacgccgatcagctcatcgccgtcaaccagtttgatcgccactttaccggcggtacgcagacggttgaactcggtgaggacagttttcttcacggtaccgttagcggtcgccatgaagactttcacgccttcttcaaactcggtcactggcaggatcgcagtgatacgttcgtcctgctccagcggcagcaggttgacgatcggacgaccgcgcgcgccacgagtggcttccggcaactgataaactttcatgctatagacgcgaccacggctggagaagcacagaatatggtcgtgagtgttcgccaccagcagtcggtcgataaagtcttcttctttaatacgtgcggcagatttacctttcccgccacgacgctgcgcttcgtattcagaaagcggctgatacttaacgtagccctggtgagagagcgtcacgaccacatcttcctgggtgatcagatcttccaggttgatgtctgcgctgttggcggtgatttcagtacgacgtttgtcaccgaactgttcacgaaccagctccagctcttcacggatcacttccatcagacgatcggcgctaccaagaatacgcaacagttccgcgatctgatccagcagctctttgtattcgtcgagcagtttttcgtgctcaagaccggtcagtttctgcaaacgcagatccagaatcgcctgagcttgctgttcggtcaggtagtacagaccatcacgcacgccgaactctggctccagccattccggacgcgcagcatcgtcgccagcacgttcgagcatcgcggcaacgttgcccagctgccacggattagcaaccagcgcagttttcgcttctgcaggcgtcggcgcatgacggatcagttcgatgatcgggtcgatgttcgccagcgccacggctaatgcttcaaggatatgagcacgatcgcgagctttacgcagttcgaaaatagtacgacgggtcaccacttcacggcggtgacgaacaaacgccgcgatgatgtctttcaggttcatgatcttcggctgaccatggtgcaatgccaccatgttgataccgaaagaaacctgcaactgggtctgggagtagaggttgttgagcacaacttcaccgaccgcatcgcgtttcacttcaatcacgatgcgcataccgtctttgtcagactcgtcacgcagcgcgctgatgccttccacgcgtttttcttttaccagttccgcaatcttctcgatcaggcgcgctttgtttacctgatacggaatttcgtggacgataatggtttcacgaccggttttggcgtcaacttccacttctgcgcgagcgcggatatacaccttgccgcgaccggtacggtaagcttcttcaataccgcgacgaccgttaatgattgccgccgtcgggaagtccggccccgggatgtgttccatcagcccttcaatgctgatgtcttcatcatcaatatacgccagacaaccgttgatgacttccgtcaggttgtgcggcgggatgttggttgccatacctacggcgataccggaagaaccgttcaccagcaggttaggaattttggttggcatgacgtccggaattttttccgtgccgtcatagttatcaacgaaatcgaccgtctctttttcgagatcggccatcagttcatgggcaattttcgccagacggatttccgtataacgcattgccgccgcagagtcgccgtcgatagaaccgaagttaccctgaccgtctaccagcatataacgcaggctgaatggctgcgccatgcggacgatcgtgtcatagaccgcgctgtcaccatggggatggtatttaccgattacgtcaccaacgacacgggcagattttttataggctttgttccagtcattgcctagtacgttcatggcgtaaagtacgcgacggtgtaccggcttcaggccatctcggacatctggcagcgcacggccaacaatgacgctcatcgcataatccagataggagctcttcagctcttcctcaatgttgaccggtgtaatttctctcgcaaggtcgctcatctaaccgctatccctctactgtatcccggattcaaaggtcgcaaattataacacagccgcgcagtttgaggtaaacctatacgctttattcacatccaatgcctgatatactcgtttgtcttgccaattacggagtagaagtgccaatgaatgccgaaaaaagcccggtaaaccataacgtagaccacgaagagatcgctaaatttgaagccgtcgcctcccgctggtgggatctggaaggtgagttcaaaccgctgcaccgcattaacccgctgcgtctgggctatattgccgagcgtgctggcggtttatttggcaaaaaggtgctcgatgtcggttgtggcggcggcattctggccgagagtatggcgcgcgaaggcgcgacggtgaccggtctggatatgggctttgagccattgcaggtggcaaaactgcacgcactggaaagcggcattcaggtggattacgtgcaggaaaccgtggaagagcacgcggcaaaacatgccgggcagtatgatgtggtgacctgcatggagatgctggagcacgtccccgatccgcagagtgtggtcagagcctgtgcgcaactggtgaaaccaggcggcgatgtctttttcagcacacttaaccgcaacggcaagagttggctgatggcggtggttggtgcggaatatattttgcgcatggtgcccaaaggcacgcatgatgtgaagaagtttattaaaccggcagaattgctgggctgggtggatcagaccagtttaaaagagcggcatatcactgggctgcattacaacccgatcactaatacttttaaactcggccccggcgtggatgtgaactatatgctgcacacgcagaataagtgaggttgatgtttggccgcgccaatgcctgatgcgacgcttgccgcgtcttatcaggcctacaaatgctccccgtaggccggataaggcgtttacgccgcatccggcaaccgtgccgactagacagtgattaccatttcaccgtcatgctcaaaaaccctgccgtctgggcaaaatcatcactccctttctgccacgccacgctgccgcgcagggacactcgctgactgatattgcccgtgactcccacttttatttcaccccgttgcttcaccgcatcgtcactgatagtgctgccatcctcttcaatttccgtgctatggggatcgtgataataattcagatctaatgttggtatgacatgaacagcggtacgccattcgctgtgtaaacccagccgcgtctgaatatcatcaccctggctttgactcacgcgcgcacggttagcggcggtaaaatcatcctgctgcacgccctgataaatcacctgcgcctgcggttcaatcaccacaccacgccccggtaaccactgataccccgcctccaggctggcgataatcccgctgctgtggtaatgatctgtgccatcttcttgttcggaaacatcattgctaaaccacgcgtattgcagccagctatccagccaggccccttgcttctgattaccgtgctgaaaccagctacttgtcagcccaacggcataaccgtggttctggttatcggcgcgagttccggtcatattgctgcggctgtcgccctggttatcgctgtagccaccaacaatcccaagcatccactcgccatccgtgccccagcgcccgctaaacagatcgccgctaagttgcaccgtagaagtgtcttcatgttgagccagttgccccgctgctgtgtaatgataatctccgccgataacacgtaaattcagcgtctgaccatcgccacctgcgtgatcgcgtcgctccatcataaacgcctgatttgccgcccgcaggttattaagataaccgccaactttggcattcaacaccggctggtaagcaggcgtaggttccgggtcgggtgttggatcaggatccggcgtgggatcaggatcgggagtcgggtctggatcaggtgggcttggcggcgttacttcttggcttcgcagataccagtcgttgttatcttccaccagcgtgtagtcatacgctcccatattgacgtagccgctgcctgccagactgaactgcgcattgttttgaaactgcgtgggatcagctgcgaaatcaaccactttaatgcctgtgcttgtcggctcaccaatccctgtaatggagttaaccaccacagttgtgttgccagcagtattaccgttcatcaccaattgatcgcttacgctgtcatcgccgtttaattcgctatcgagcagtagcgtaccgccgccggtataatcaccgtttaccgtcagcgtatcgccagcgacgccattttgcaggctaaccgcaccggacgtattggtcagattgccattaaccgtcacgttggaaagataagtcaggctgtcagtttcaaggttggtattaagctcacctgtcaacgtcacaccatcggtggcattcaccagcgtcccatcgccgttaaatagactggcattaagggcgacggaagtatcctgcccggtcaggcgcaaaaccgtaccatcgctgatgtcgatagtgccgctggaaatagcatcaatactctgaatatcctgatccgcgccagtaacgaacgttgccccatcaccaacccacagactgctagcataaggaaggatatcagcaacatcacctttcagggtgccttcttcgacacgtaccgcgctctgcgttgtaccgctggcggtcagctccagtgtaccagcccccgttttagtcaatgtactaccctcatcctgatgctgcccgctgctgtcagccatcagtgcgccccactgcgtgtctacccccgcatcaactgccacttcaccgtcggcgcgcatttcaatatcacgtccgtggcctgccgcatcactacgcgtgtcaacgtcggaggtaatctccatcacgctttcttgttgcttatcggtaaagataacctggcggttatagtgggtatctccaagctggctgttgtcgctcaccatcagcgtaccggaggcgatttgtgttgtgcccaaataactattattgtttgccagacttacctgcccgtcgctcgcatcgaccaccacgtagacgccatctttcccgtcgccgccgatatgcaaattgtcgccacctgcaagatctaccacatcctgactgccgataaccgttccgctgctgccactgacttcaaggccatcgttgtaacttgtgccgctctgccaggtggagaaatcagagagatcgagcacaccgccgtttaacacgatgctctgcggatcgtcctggagagcggtaagatctgccgcgtcgccttccaggctaagcaccgcaccatcatcaacgactatatcgccggttagcgccatgctctgcgcccctgccagcacgtagctgccgttttgcgcaatggtgagctgaccagcaccttcgatgatgccagcaaaactgccctgattaacagtaacgttgccaccagcatcgatatttaaagtgccattctgaaagcccgtcaatgcgtgcacaaaagtttgttgggtgctgccaacgtttagctcagcctgattctgatactgatcaatactccctatcgtcagaccgtagcagtcttgcggatcgtcctggcaatgcgtatcgccgacattcatcagggagttgctgcggcccagggtaacttcaccgttttcaatctgcatctcaccagtaaagtcattgttatctgcattaagtaccagatcgccggaacctgttttggtgattaacccggtaccagcaatagagtcaacagctccgtcattctctgtattgccaataaccagcgtttttccgtcggcaatatcaaaggtaacttcacttaagccgagatacataaagccacccgccgcagaggaaggaccatctccatagcctgctgcgctattgttctcatcgactaacacgcctccgttctggctgtagctgtcatcaacagaaatatcaataagatagggagccgtcacgctattggtatatatcgccccgccataaccttcggcagtgttatttgtaaaggcagtgttatttactatcgtataaccactaggatgcttgctgtcgctattattatcggtaacatcgattgccccgccatcgccatcactgtaacttgtacttgtatatgcctggttgttatcaaaaataacatcacttaaataaacgtcattattaatggtataaattgcgccacctttgccatcattagcgatgttattgcgaaacatggcgttagtgacacgtaaatcgacggcaccagtatcgttagtaccagaagaatagattgcgccaccatagccgcctgcgacgttaccggaaaaaataacatcagtaagattcagcgtactgttttctttagcaaatatggccccgccgttattatattctcctgtaacggtgttattggcaaacagagtcattccagtttcattttctggtaatagactaaattccgctccttgttgcaaaaatacggccccaccgctggcgttattggtcatatcgctaaaaaccagccattgcccatcagcgatactccagtcctgcgtaatgccactaaggctttgcctgctggcctgacaactcgctttgacatcatatccctggcaactatcagtgaccgccgcgacaccgttagcagagaaaagagatgcaatcatactcgggagtaaagataaatactccttgcgtagaaagataatccgcatattaatctaaccatcattttctataagacggcgtatttaatcgcattatacgatatggaatatctttcttttgtaaattgttcaacccggtgcaatggctattttgttattatttgatgaataatatcagtgcgtcataattcaagttaataaccttcagggatatcagttatatttaaactaaattaaagtcatgaataattttcttataatataaggtaaattaacaaaatggcttagcatttaacaataaccgaatagaaaacaaccatttcgccatcaacaatctcttacattcgcttatatattgaccacaactgatacatcagattatgtgatgactcgtgcttagatcaatttttgcaatcattagcaaaaagattaataagccatctatatcaatttatctaacctattatgccgttcaagaaatcgccgaacagttatttttaacaaatttttctcttcccattgactttcccggacaccttgtctgacctaaggtgcgcgaaagccactttttccttcctgagttatccacaaagttatgcacttgcaagagggtcattttcacactatcttgcagtgaatcccaaacataccccctatatatagtgttctaagcagcttcccgtactacaggtagtctgcatgaaactattgcggaaagaattccaaaaacaggtacgacatacatgaatcagaatctgctggtgacaaagcgcgacggtagcacagagcgcatcaatctcgacaaaatccatcgcgttctggattgggcggcagaaggactgcataacgttagcatttcccaggtcgagctgcgctcccacattcagttttatgacggtatcaagacctctgacatccacgaaaccattatcaaggctgccgcagacctgatctcccgtgatgcgccggattatcagtatctcgccgcgcgcctggcgatcttccacctgcgtaaaaaagcctacggccagtttgagccgcctgcgctgtacgaccacgtggtgaaaatggtcgagatgggcaaatacgataatcatctgctggaagactacacggaagaagagttcaagcagatggacacctttatcgatcacgaccgtgatatgaccttctcttatgctgccgttaagcagctggaaggcaaatatctggtacagaaccgcgtgaccggcgaaatctatgagagcgcccagttcctttatattctagttgccgcgtgcttgttcagcaactacccgcgtgaaacgcgcctgcaatatgtgaagcgtttttacgacgcggtttccacatttaaaattagcctgccgacgccaatcatgtccggcgtgcgtaccccgactcgtcagttcagctcctgcgtactgatcgagtgcggtgacagcctggattccatcaacgccacctccagcgcgattgttaaatacgtttcccagcgtgccgggatcggcatcaacgccgggcgtattcgtgcgctgggtagcccgattcgcggtggtgaagcgttccataccggctgcattccgttctacaaacatttccagacagcggtgaaatcctgctctcagggcggtgtgcgcggcggtgcggcaacgctgttctacccgatgtggcatctggaagtggaaagcctgctggtgttgaaaaacaaccgtggtgtggaaggcaaccgcgtgcgtcatatggactacggggtacaaatcaacaaactgatgtatacccgtctgctgaaaggtgaagatatcaccctgttcagcccgtccgacgtaccggggctgtacgacgcgttcttcgccgatcaggaagagtttgaacgtctgtataccaaatatgagaaagacgacagcatccgcaagcagcgtgtgaaagccgttgagctgttcagcctgatgatgcaggaacgtgcgtctaccggtcgtatctatattcagaacgttgaccactgcaatacccatagcccgtttgatccggccatcgcgccagtgcgtcagtctaacctgtgcctggagatagccctgccgaccaaaccgctgaacgacgtcaacgacgagaacggtgaaatcgcgctgtgtacgctgtctgctttcaacctgggcgcaattaataacctggatgaactggaagagctggcaattctggcggttcgtgcacttgacgcgctgctggattatcaggattacccgatcccggccgccaaacgtggagcgatgggtcgtcgtacgctgggtattggtgtgatcaacttcgcttactacctggcgaagcacggtaaacgctactccgacggcagcgccaacaacctgacgcataaaaccttcgaagccattcagtattacctgctgaaagcctctaatgagctggcgaaagagcaaggcgcgtgcccgtggtttaacgaaaccacttacgcgaaagggatcctgccgatcgatacctataagaaagatctggataccatcgctaatgagccgctgcattacgactgggaagctctgcgtgagagtatcaaaacgcacggtctgcgtaactccacgctttctgctctgatgccgtccgagacttctagccagatctctaacgccactaacggtattgaaccgccgcgcggttacgtcagcatcaaagcgagcaaagacggtattttgcgccaggtggtgccggactacgagcacctgcacgacgcctatgagctgctgtgggaaatgccgggtaacgatggttatctgcaactggtgggtatcatgcagaaatttatcgatcagagcatctctgccaacaccaactacgatccgagtcgcttcccgagtggaaaagtgccgatgcagcagttgctgaaagacctgctcaccgcctacaaattcggggtcaaaacactgtattatcagaacacccgtgacggcgctgaagacgcacaagacgatctggtgccgagtatccaggacgatggctgcgaaagcggcgcatgtaagatctgatattgagatgccggatgcggcgtaaacgccttatccggcctacggctcggtttgtaggcctgataagacgcgccagcgtcgcatcaggctccgggtgccggatgcagcgtgaacgccttatccggcctacggctcggatttgtaggcctgataagacgcgccagcgtcgcatcaggcacaggatgcggcgtaaaatgccttatccggcattaaactcccaacaggacacactcatggcatataccacctttagtcagacgaaaaatgatcagctcaaagaaccgatgttctttggtcagccggtcaacgtggctcgctacgatcagcaaaaatatgacatcttcgaaaagctgatcgaaaagcagctctctttcttctggcgtccggaagaagttgacgtctcccgcgaccgtatagattaccaggcgctgccggagcacgaaaaacacatctttatcagcaacctgaaatatcagacgctgctggattccattcagggtcgtagcccgaacgtggcgctattgccgcttatttctattccggaactggaaacctgggtcgaaacctgggcgttcagtgaaacgattcattcccgttcctatactcatatcattcgtaatatcgttaacgatccgtctgttgtgtttgacgatatcgtcaccaacgagcagatccagaaacgtgcggaagggatctccagctattacgatgagctgatcgaaatgaccagctactggcatctgctgggcgaaggtacccacaccgttaacggtaaaactgtgaccgttagcctgcgcgagctgaagaaaaaactgtatctctgcctgatgagcgttaacgcgctggaagcgattcgtttctacgtcagctttgcttgttccttcgcatttgcagaacgcgaattgatggaaggcaacgccaaaattattcgcctgattgcccgcgacgaagccctgcacctgaccggcacccagcatatgctgaatctgctgcgcagcggcgcggacgatcctgagatggcggaaattgccgaagagtgtaagcaggagtgctatgacctgtttgttcaggcagctcaacaggagaaagactgggcggattatctgttccgcgacggtagcatgattggtctgaataaagacattctctgccagtacgttgaatacatcaccaatatccgtatgcaggcagtcggtttggatctgccgttccagacgcgctccaacccgatcccgtggatcaacacttggctggtgtctgataacgtgcaggttgctccgcaggaagtggaagtcagttcttatctggtcgggcagattgacagcgaagtggacaccgacgatttgagtaacttccagctctgatggcccgcgttaccctgcgcatcactggcacacaactgctgtgccaggatgaacacccttcccttctggcggcgctggaatcccacaatgtggcggttgagtaccagtgtcgcgaaggttactgcggctcctgtcgcacacgcctggttgcaggtcaagttgactggattgccgaaccgttagcctttattcagccgggggaaattttgccctgttgttgccgggcaaaaggcgatattgaaatcgagatgtgaattggttgtagtgccagatacaacgcttatgcgtcttatctggcctacaacgattacatggcgtagtaatacgctttcacctgctcccagtccgctttggggattggctccagatatttttccagctggcggaagtcatgattaatcgctttatcgcgacgcaagcggcgacgacttttctccaggtcaagaaaaccagcttctgcattaccttctgttttcacatagatatggcgaacataacaacagccatgctgacgattaatgctatgcattttcttaaacgccagcgccactgctttcaacatggcttgccgtacttcgtcagaataagggcttactgcatgctgggcataccagtcagcaatgctgatgaaccccgccatatcttcagtcaccagcaacgctcgccattcaccctcaattttcaccgcttcaccaaaaacgatcttcggcacgatgacaccggcccgttccagttctttaattaccgcaacctcacggacaatcgttggtcggccgaacggataacgtacggaatgaaacagatgatgcgtcatgcgctttacatacagctttttgccgttgcgctcgacgcattgcaccccgctcataccattacggcgatagttaggctcttcaacccagtcgccctctgttgcccaccagtgattaaattcgtcgtactttgcactaactgccataccctatcgcctgtcatttttattaacgacaatgactataggtggttacctgaggaaaatcttaatgaaacgtgtcgtattaatgaatttcttttgccactactagcttgacaccgcttttacccttcatttgcagcgcatagattccaccagccactaccactaatagtgcgcccagcagataaaatgtgaatttaatcaggcggatacagcgatgaattttattcgacagggattaggcatcgccttacaaccagagttaacgctgaaaagcattgcaggtgaattgtgttccgttcctctcgaaccaactttctatcgacagattagcttgctggctaaagaaaagccggtagaaggcagtccactgtttttactacaaatgtgcatggaacaattagtggcgattggaaaaatttgatatgagacaggatggcgcatgaacgccatcctgcagtaacattactctttattaagaaattttactgccttatcagggaaatcagtaaacagcccatttacacccgctttgttatacagagcatcatataactgattcacatcaggagtgtattcaggcagtttatcactccgcacggtataaggatgcactaccagtttattctgctgagcatcttgcaccatgccagtgagtttgatattacccggctggcttgtctcctcaatcaacatatggtaatccggaccaataccatctgcatattccgccacctgtttcatggcacccggcttaaacatccagtcgtagttgtaattaacccagcttccatccggctgtttctgctgcgtttcattccagtcggtataggcaatcagctgtaccagattgagctccatgcccattttgggttccagctcattcttaatacgcttcagctcatcagcatcaaaacattgcaaataaactttatcgtctttaccggtgtaaccatatttcttcagcacttccagcgtttttgccgcaatatccttcccttcctgatgatggaaccacggcgctttgatttctggataaataccgatatttttcccggtagagtgatttaacccctgaacaaattcaatctcttcttcaaaggtgtgcacccggaagtcggacttacccattgggaaacgccccggataagtctgcacttttttaccgttttcaatatcgaaaccttcggtaaatttcaagctcttaatttcatccagcgtgaaatctatcgcgtagtaacgaccgtctttgcgcgcccgatccgggaaacgatcggcaacatcagtaacacgatcgaggtaatggtcatgcagaacaaccagattgtcgtctttggtcatcaccaaatcctgttccagataatccgctccctgcgcatacgccatcgcttttgctggcagcgtatgctccggcaaatatccactggcaccgcgatgggcgatgactattttttcgttgctgtccgccgccattgcactgcttcccatgactatagtgctcatcatgatcgccatgctaaggtttttcagcgtcaatttcatgccattagcctccgttgcgttcttgcagtaattgttcatggcgacgtttttcgccaatcatcacaacaatcaacaagataaccgccagaatgctgccgccaatcattaccataaagccgccatcccagccgaagaagtccacggtgtagccaacaatcgcgctcgccgccacgctaccgcccaggtaaccaaacagcccggtaaagcccgctgccgtacctgccgcttttttcggtgccagttccagcgcatgcagaccgatcagcatcacaggaccgtagatcaggaagccgataacaatcatacaaatcatatcgacggttgggttacctgccgggttcatccagtaaacgatagtcgcgatggtcaccagtgtcataaagaaaacgccggttgccccacggttgccacggaagactttatcgttcatccagccgcacagcagagtgcccggaatacctgcatattcataaaggaagtaggcccaggaggatttatctagcgcgaaatgcttaacctctttcagataagtcggactccagtcgaggatgccgtaacgcagcagataaacgaacacgttggcgatggcgatataccacagcagtttgttcggcagtacgtactgcatgaagatttgcttcgccgtcagctcctgttccgctttttcgttatagtcgtccggataatcatttttgtactcttcgatcggcggcaagccacaggattgcggggtatcgcgcatcatcgcaaaggcgaataatgccaccagaatggcgcagaaagcaggcatatagagcgccgcatgccagtcattgaaccaggccatccccagcaggaacagcagcggcggaataccaccaccgacgttgtgcgcacagttccacacactcacaatgccgccacgttctttctggctccaccagtgcaccatagtacgaccacacggcggccaccccatcccctggaaccaaccgcagaggaacaacagtacaaacatcaccgcaatgctgctcgtcgcccatggcacaaagcccataaacaacatcactgccgccgccagaatcaaacctgcgggcaggaaaacgcgcggattgctgcgatcgcttacgctacccatgatgaatttgctaaatccataagcaatgctgatcccgctaagggcaaaacctaaatcaccgcgactgaatccctgctcaaccagataaggcatagcaagcgcaaagttcttacgaaccaaatagtaagccgcatagccaaagaatatccccaggaaaatttgccagcgcaatcgacgataagtcggatcgatctccgcggcaggtaagcgcgctttgtgtggcgctggtttaaaaatactcaacattgatagcctccgtggcccgtggtcttatttatgattaacagcctgattcagtgagagaacctgccgtttcttgagttgccgcgatgttaagaaaacattcataaattaaatgtgaattgccgcacacattattaaataagatttacaaaatgttcaaaatgacgcatgaaatcacgtttcactttcgaattatgagcgaatatgcgcgaaatcaaacaattcatgtttttactatggctaaatggtaaaaaacgaacttcagagggataacaatgaaaactcgcgacagccaaagtagtgacgtgattatcattggcggcggcgcaacgggagccgggattgcccgcgactgtgccctgcgcgggctgcgcgtgattttggttgagcgccacgacatcgcaaccggtgccaccgggcgtaaccacggcctgctgcacagcggtgcgcgctatgcggtaaccgatgcggaaagcgcccgcgaatgcattagtgaaaaccagatcctgaaacgcattgcacgtcactgcgttgaaccaaccaacggcctgtttatcaccctgccggaagatgacctctccttccaggccacttttattcgcgcctgcgaagaagcagggatcagcgcagaagctatagacccgcagcaagcgcgcattatcgaacctgccgttaacccggcactgattggcgcggtgaaagttccggatggcaccgttgatccatttcgtctgaccgcagcaaacatgctggatgccaaagaacacggtgccgttatccttaccgctcatgaagtcacggggctgattcgtgaaggcgcgacggtgtgcggtgttcgtgtacgtaaccatctcaccggcgaaactcaggcccttcatgcacctgtcgtggttaatgccgctgggatctgggggcaacacattgccgaatatgccgatctgcgcattcgcatgttcccggcgaaaggaagcctgctgatcatggatcaccgcattaaccagcatgtgatcaaccgctgccgtaaaccttccgacgccgatattctggtgcctggcgataccattagcctgattggtaccacctctttacgtattgattacaacgagattgacgataatcgagtgacggcagaagaggttgatattctgctgcgtgaaggggaaaaactggcccccgtgatggcgaaaacgcgcattttgcgggcctattctggcgtgcgcccgctggttgccagcgatgacgacccgagcggacgtaacgtcagccgtggcatcgtgctgctcgaccatgctgaacgcgatggtctggacggatttatcaccatcaccggtggcaaactgatgacctatcggctgatggctgaatgggctaccgacgcggtatgccgcaaactgggcaacacgcgcccctgtacgactgccgatctggcactgcctggtagtcaagaacccgctgaagttaccttgcgtaaagtcatctccctgcctgccccgctgcgcggttctgcggtttatcgtcatggcgatcgcacgcctgcctggctgagcgaaggccgtctgcaccgtagcctggtatgtgagtgcgaagcggtaactgcgggtgaagtgcagtacgcggtagaaaatttaaacgttaatagcctgctggatttacgccgtcgtacccgtgtggggatgggcacctgccagggcgaactctgcgcctgccgcgctgccggactgctgcaacgttttaacgtcacgacgtccgcgcaatctatcgagcaactttccaccttccttaacgaacgctggaaaggcgtgcaacccatcgcctggggagatgcactgcgcgaaagcgaatttacccgctgggtttatcagggattgtgtggtctggagaaggagcagaaagatgcgctttgatactgtcattatgggcggcggcctcgccggattactctgtggcctgcaactgcaaaaacacggcctgcgctgtgccattgtcactcgtggtcaaagcgcactgcatttcagttccggaagcctggatttgctgagccatctgccagatggtcaaccggtgacagacattcacagtggactggaatctttgcgtcagcaggcaccagcccatccttactcccttctcgagccacaacgcgtgctcgatctcgcttgccaggcgcaggcattaatcgctgaaagcggtgcgcaattgcagggcagcgtagaacttgctcaccagcgggttacgccgctcggcactctgcgctctacctggctaagtagcccagaagtccccgtctggccgctgcccgcgaagaaaatatgtgtagtgggaattagcggcctgatggattttcaggcgcaccttgcggcagctagcttgcgtgaactcggccttgccgttgaaaccgcagaaatagagctgccggaactggatgtgctgcgcaataacgccaccgaatttcgcgcggtgaatatcgcccgtttccttgataatgaagaaaactggccgctgttacttgatgcgcttattcctgtcgccaatacctgcgaaatgatcctgatgcccgcctgcttcggtctggccgatgacaaactgtggcgttggttgaatgaaaaactaccttgtagtctgatgcttttgccaacgctgccgccttccgtgctgggcattcgtctgcaaaaccagttacagcgccagtttgtgcgccagggtggcgtgtggatgccgggcgatgaagtgaaaaaagtgacctgtaaaaatggcgtagtgaacgaaatctggacccgcaatcacgccgatattccgctacgtccacgtttcgcggttctcgccagcggcagtttctttagtggcggactggtagcggaacgtaacggcattcgagagccgattctcggccttgatgtgctacaaaccgccacgcggggtgaatggtataagggagatttttttgcgccgcaaccgtggcagcagttcggtgtaaccactgatgagacgctacgcccgagtcaggcagggcaaaccattgaaaacctgtttgccatcggtagcgtgctgggcggatttgatcccatcgcccagggatgcggcggcggtgtttgtgccgtcagtgctttacatgccgctcaacagattgcccaacgcgcaggaggccaacaatgaatgacaccagcttcgaaaactgcattaagtgcaccgtctgcaccaccgcctgcccggtgagccgggtgaatcccggttatccagggccaaaacaagccgggccggatggcgagcgtctgcgtttgaaagatggcgcactgtatgacgaggcgctgaaatattgcatcaactgcaaacgttgtgaagtcgcctgcccgtccgatgtgaagattggcgatattatccagcgcgcgcgggcgaaatatgacaccacgcgcccgagcctgcgtaattttgtgttgagtcataccgacctgatgggtagcgtttccacgccgttcgcaccaatcgtcaacaccgctaccagcctgaaaccggtgcggcagctgcttgatgcggcgttaaaaatcgatcatcgccgcacgctaccgaaatactccttcggcacgttccgtcgctggtatcgcagcgtggcggctcagcaagcacaatataaagaccaggtcgctttctttcacggctgcttcgttaactacaaccatccgcagttaggtaaagatttaattaaagtgctcaacgcaatgggtaccggtgtacaactgctcagcaaagaaaaatgctgcggcgtaccgctaatcgccaacggctttaccgataaagcacgcaaacaggcaattacgaatgtagagagcatccgcgaagctgtgggagtaaaaggcattccggtgattgccacctccagtacctgtacatttgccctgcgcgacgaatacccggaagtgctgaatgtcgacaacaaaggcttgcgcgatcatatcgaactggcaacccgctggctgtggcgcaagctggacgaaggcaaaacgttaccgctgaaaccgctgccgctgaaagtggtttatcacactccgtgccatatggaaaaaatgggctggacgctctacaccctggagctgttgcgtaacatcccggggcttgagttaacggtgctggattcccagtgctgcggtattgcgggtacttacggtttcaaaaaagagaactaccccaccagtcaagccatcggcgcaccactgttccgccagatagaagaaagcggcgcagatctggtggtcaccgactgcgaaacctgtaaatggcagattgagatgtccacaagtcttcgctgcgaacatccgattacgctactggcccaggcgctggcttaaactcctttctgatgcccggtaagcatgtggttaccgggcatttttgcgtacacgattccgtgcccaatgtatgcgttgcaacgcagtgaaaattcctctgaaaacgtctcgcaaaggctgaaactggcagatgtcaaaggcctgggataaccgtaatgtcgcgtcatcataaatatcaggtgacggacaaccatgaccgaaagtacaacctcctccccgcatgatgcggtatttaaaacctttatgttcacacccgaaaccgcacgggattttctcgaaatacatttaccagaaccactgcgcaagctttgcaacctgcaaaccttacgcctggaacccactagttttattgaaaaaagtttacgcgcttactacagcgatgttttgtggtccgtggaaaccagcgacggtgacggctatatctactgcgtgattgaacatcaaagctctgcagaaaagaatatggcttttcggctaatgcgctatgccactgccgccatgcagcgtcaccaggacaaaggctatgacagagtcccgctggtggtgccgttgctgttttatcatggcgaaaccagcccttacccgtacagtctcaactggctggatgagtttgacgatccgcaacttgcccggcagttgtacaccgaagcttttctgttggtggatatcaccatcgtacctgacgatgagatcatgcaacatcggcgtatagctctgctggaactgattcaaaagcatattcgcgaccgcgatttaatcggcatggtcgacaggatcaccacgcttttggttagaggcttcactaatgacagccagctacaaacactgtttaattatctgctgcaatgcggcgatacctcccgtttcacccgttttattgaggagattgccgaacgtagtccactacaaaaggagagattaatgactattgctgaacggctacggcaggaagggcatcaaattggctggcaggaaggtatgcatgaacaagccattaaaattgctttgcgcatgctggagcagggctttgaacgtgagattgtgctggcgacaacccaactcactgatgctgatattccgaactgtcattaaaaggagagattaatgactattgctgaacggctgcggcaggaaggacatcaaattggctggcaggaaggtaaattagaaggtttgcatgaacaagccattaaaattgctttgcgcatgctggaacagggctttgatcgtgaccaggtgctcgcggccacccagctaagcgaagccgatctggcagcgaataaccactaattaacacaggcccacagccgatccccatgggcctttgatatcaataactaccttttatgcgtggcccatttttgccacttttaaacatcgccagtcgttgatccagggcatcgctgtagagcatcgtgtcaacgccaacagcgacaaagttcgctccccacgccaggcattgctgcgccatatcaggagccacagccagaaaaccagccgctttacccgcagcacggatccgccgaatactggtttcaataattcgctgcacttccgggtgcccggcgttatccgggtagcccaagctcgcagaaagatccgcaggtccaataaacacgccatcaatcccttcgacgtcgaggatttcgtccaggttatccagtgccgttttactttccacctgcaccaacagacaaaggctatcgttaacttgcgccatgtaattctcaatgcgtccccagcgcgcagcccgtgccacactggccccgacaccacgctcaccgtagggaggatagcgcgtggcagacaccacctgacgtgcctgttcggcagtatcgaccatcgggatcagtagagtttgcgcgccaatatccaggacttgtttaatcagcggtttactgccttccaccggacggatcacgggttggctggcatagggcgctaccgcctgtagctgatgataaagatcctgaatggtgtttggcgcgtgctccccgtcaatcagcaaccagtcataaccagaagtggcggcaatttctgccatataggcagtcgtactgcttaaccacagaccaatttgcacttcgcccttgcgtaaacgttctttaaagggattgcttaataatgcgttcatcgtgttccttaacctatttaatgatgtgccacgtcggtctgcgcaacagtgcgatttacacgcagagtgaaaataatcaggctaccgatgaccgccaccgctgccagcgtcagtaatcccgccgcatcgctggcaaataacgtttctgctttcacgcgcaggatcggggcaataaacccgcccactgcaccaaacaggtttacaaaaccaattcccgcagccagcgccgtaccggaaagcagttgtgtcggcatcgtccagaacactggctgcacggcaataaacccgatagctgcaacacacagcgctacgatcgccattactggagaaagcagcccggacagaccaataccaatgcccgccgccagtaatgtcagcgctgcgacattacgccgttcgccggttttatcggaatagcgcggaataagccaggtcccaaacaaggccgcaacccacggaatggcggtgaccacgctcgctgtaaagcccacttttgttcccagcaatgccgcaacctgggtcggcaggaagaaaattaatccgtaaaccgccacctgaatggtcaggtagataatcgctagttgccagactcggccattacgcagcgcatcgctcagccgagaagtcactttctgttgttcttcacttgccagttgattgataagcaacgttttttcttgtttactcagaaaacgtgcctgctccggtgtgtcatcaagccaaaagaatgtgaataccccagcaccgactgccaacaatccttcaatcacaaacatccagaaccagccgggatgccccataaatccatgcatctccaacagcgcgccggaaagcggacttcccagtgttaacgccagcggtgcgcccatatagaacagccccataatgctggcgcgattacgctgcggaaaccattggctggtgagataaatcataccagggaaaaatccggcctccgcagcacgaagcagagtgcgaactatcagaaatttcgcttcagtatcggcccatgccatggctgcgctaagaaatccccacagcagtgttgtcgtaccaatccaggttctggcccccagtttgcgcatcaaaagattcgccggaacacccagaaacgcatataccacaaagaaaatgcctgctcccagcgcataagcttcattactcaacccggtatcaatctggtaggtctgtttggcaaaaccgatattgctacggtcgagaaacgccagcacatacagcgccaacataaacggaattaaacgcacacggtttttcttcaccacggcgtcaagcaaagcggtgctcataaaaagctccttagaatatgtgggcgttaccgttgtcacagcaacgcccggagtgattagtggctgtaggggcgtttcaaattgcagtcatgattgagttcgacgccaaaaccgggtttatcaagcacacttttatgaatacgaccattcaccggaaccggctcattgagcagaatcgggtcaaactgcggacgcatcgtactacaatccgggctggtcatcaggaattcgctgaatggcgtattggtgaaggtgatcaccgcatggtgagagtaaacagagctaccgtgcggcaccaccagttgccccctggatttggcgattgcggcaatttccaccagcgtggttaaaccaccgcaccagccaacatccggctgcataatgtcgataccggtttcactaagcgtacgaaaagattgcagtgtgccgtggtgctcaccgctggtgaccatcattccgactggcgcgttgcgtttcagttcgcgataactttcatactgctgtggcggcaggcactcttcgatccatttcaggttatagggcgcgcaagcgtgggccagtttggtcgcatagttcacgtcctgactcatccagcagtcgagcattaaccagaaatcctcaccgcatttttcacgcatatccgcgaccatagcggcatctttgcggatccccgcatcgccatcatgtggcccccagtgcgtcggcattttgccaccgataaagcccatctcttttgccagatccggacgcgcacctgtggcgtagaactgaatctcatcacgaacagcgccgcctaaaagtttataaaccggaagcccgaccactttgccgaacagatcccacagagccagatcgacacaagaaatcgtattcatcaccaggccaccagagccggagtaatacagggtggcactgagcatttgatcgtggatcagtttgatatcactgacacatttaccctcaatgaaacggttaagatgtttttcgacaataaaacagcccatttcaccggctgtgctaacggcgaatccggtctggccgttttctgcttcgacttcaacaaccaacgtgccaagaacgttaatgccaaaactctggcgactctgctcgtaatcgcggtatttactcatcggggtggcaatatgatcgtctatccagtgattcgccccctggtcgtgataatcaccgccgccagcgcctttttctgctgtcgcaccgccagtaaaccaggcgcgaacctgtttaatttttggtagggtcatgatgttctccattgttaactggcttgtaagtcaaagggacttttccatcccaacagacgactaatatccctggcgcaggcaatggccttgcccgccagataatcacggtattcttcattgatttgtaagcgggtaccgaccacgctgatcgcagcggtaagctcgttattggcgttaaacaccggcgcagcgacacaacggacatcggcgtaatcttcgccgttgtcatagctccagccctgacggcgaatacgcgccagttcttcgtgaagttgctgtggatgagtaatcgttgtgggtgtcgcctgctcccagaccagcccttcgataatactttgctgtaccgctgcaggttgccaggcaagcaggcatttacctattccggagcgataaaggctaaggctttttccttcatgggaacgcacgctgatagtggcactactctccactttcaaaatgtaataagcgctgccgttatcaataatccccaggtgacataacagcccggtggtatccatcagttgcgtcaaacgcggtcgagccagttcccggagatccatcttgcttaacgcatgaccggaaagctccaccagcctggtccacaaacaaaaattttcctggtgatcaaggctaagaaaacgctgacgcctgagttcattaagcagcaaataggccgtgcttttagggattcccaatgtgtcaatgatcgtcgcagcactacaggggccaatgcgggcaatcaaattgagaatatcaatagcccgtgtcagggcgggaactttgctactttccaacatactggactccagtcttagatactggaatcagtctcgttgctcagggggagtaaaattgtgaagcgcatcaaatcccgctcctcgtccagcagactggagaaattacgcacaaatttgtgaatcagcgcacggattttttcttattgagtacaacaggttggacaaattttgccggagggggaatgtgccggtgcagtaaaccggcacagagtggcggaatcagacagataaggtcatggactcaacaacctcaatccagccatgctcactggcgatatcctggccgtttaaccaacggcgcagcatattcagtgccatcattgcgcacacttcctgacggatagccaggctgtagcgcgtagtgctgaaacgcacacgcagagcgaaagtgccgtctggcgtggctagcgcaaagttgagatgctcgttctcgaaaccgctaacagccagtgccagcccggcaaaatggttggcccgccgttctgtaatccagtgcgcagtttgcgccagggtttcctcctgactaggaaccacttcacacgccagcaatggagcacctgcgcgagaaagttgcaaagccaataaaccaccggtgaattgctcgctcaacgtcaggctgaactggcggttttgcaattcgcgactgatctgcgcgggcagtccttcagtgccttcgaaaatcacgctctgtccggcaacacgtttaacatccagccacagtttttccatcgcctgttgctcgcttgccggtccggtgagtttcagttcgatgataggcatactggagcgatagcccattgttacgcccggcggcagttgtagagtgtccaggctttgtgccagatcgctttcgctacgaccaaaagtagtcaaacgcagacaaaccggcggctgcggtaaagaaaaacgctcgcgcaggcgcggcaggatttcgtgctcgaccatcaccttaaattcactcggtacgccgggagtaaagaacatcaggcaacgattaagctgcacggcaaaaccacaggcggtgcctaccgggttattgataaattcagcactggcaggcagctccgcttgtttacggttgctcggtgccattactcgtccacgttcgtggaaatagcgttccatctctttgagccaggcttcatgcagcaccaggccttcaccttttgctgtcgcagcggcgagtgcgcttaaatcatcgctggtcggtcccagcccgccgttaacgatcagcacatcggcgtgctgactacgttcgcgaagaatggtgactaagtcatcaaggttatcccccaccgtattgcggcgagataatggcaacccctgatgaaagaaaaaatcggccagccaggcagcgttagtgtcaacgatttgcccgtgtaacacttcatccccggtggataacatttccacttttaacatggttatctcctgcttttgttatcgaatcactataacgcaaagggagataaggcgtagtaagaaactgaatggcgcgacagaatgccgcgccggaagggatcagaaactggcgttaaccccaacatacgggccgtcagccacggcgttgtcgcggttaccgtctttaccgctcagattcaggtagcgataacccgcctcaatactgactggacgcataatggtgtaacgcgcgccagcattcgcttcttcataactttgaataccgctggagaggctatccggagagtagtaatactcgccaaacaaacggaagctgttgccaattttccactgcaaaccacctcctaccgctgcggcataaccttcatcgccgtaattcgggttggtgtaaacgccttttccgccaacggtcgccattaacggcccgagaggcagattcaaccccagccccacgccagcgacatcaccgtcgtcgtcgttatgtgtccagttaccgcttaacgccaggcccgtcgtttcagtcccaaaaccgacaccaatattggtgtattctttacccgcctgaccgctgatgctcattgcattgacgcttgcagaaaccaacagcattccggccagacctgctagcgcaatttttttcattatcccctttcccacaagcaattaatcaaaattcccaaagctgcgggattgtactgcctggcacagaggattcaatgagcgaaaaaaaggatctagtcacttattgtaactaaatacttcttaaataattaaatgccgaaaaaataaacacactttatcgatacacacaaaaataataataagtacagttatcatcgcaaaagagattactgtcactttcacatatttgtgagttaccgtattctcatggtttctttttatttataaggaatatccctgtgcgacaacggactattgtatgccctttgattcaaaatgatggtgcttatttgctgtgtaaaatggccgacgatcgcggcgttttccccggtcaatgggcgattagcggtggcggcgtggagcctggcgaacgaattgaagaggcactacgccgcgaaattcgcgaagaactgggagaacagctgcttttgacagaaatcacgccgtggaccttcagcgatgatattcgcaccaagacgtatgcagatggtcgcaaggaagagatttatatgatttacctgatttttgactgcgtttctgccaaccgagaagtgaaaataaacgaagagtttcaggactacgcgtgggtaaaacctgaagatctggtgcattatgatttgaatgtcgccacccgaaaaacgttacgtttgaaaggtcttctgtaacaatgatgacagccattactggctgtcagattgaaaatttagtggttaacgaattccccatccagataaactttgcctttttccacatgcatgactaaaccatccagataatcaggtttaaatgtcgcgtcacgcttatctttagcaatatatgtcaggcaatgattatgggtgaaaataacgatatttttatcaggcgctttgctttgtaagtccttaattgcactataaatctcattaccgcactgaagaagtcgtttatctaccgtcaattttttacccgcactaaaccaggtagcgctctgaatggtccggacggtattactggaataaagatcgaaatcagggatatcagcactaaaagcgttgcccagttcacgggcatcctgggtacctttaaccgtaatacctgttttatcactcaagcattgattggtactacggtcgcaacgttcagcatgacgaaacaaaacgacaaccgggtgctgctgtgccagtctggccagtgttttattgtcgatacgtggcaaaccattgctactccaggcggcatgagtacccagtccggcaattgcagcgagcgccagtaaaatgatgatatattttttactcttcaagctagagcggcaaaaagctaacacgtaaactccacctatagacaagcgcaaccagacaattaccgtgaaattgagctacatttctggcgataattcgcagttggtgtaatattaaaaatcctacgatgtcggcaaaatgcctcaaaattttgccaaatgcaaagcctaaataagaaaaaatataaaaatttcaatatttacgtctaatattagtttcttaaggttaagttaatattctatccttaaaatttcgctccaaatggcaaaatatacacaacactctttatagcaaatataagtggacaggtattcaatggcggaaggaaaagcaatgagtgaatttttgccttttagccgaccagcaatgggcgtggaggaactcgctgcagttaaagaggttctcgaatccggttggatcacaaccggtccgaagaatcaggcgcttgagcaagctttttgccagttgacgggaaatcagcatgccatcgcggtcagtagtgccaccgccggaatgcatatcacgctaatggcgttgaaaattggcaagggcgatgaagtgattacgccttccctgacctgggttagtaccctcaatatgatttccttgttgggtgcaacgccggtaatggtggatgtcgaccgcgatacgctgatggtcacgcctgaagctatcgagagtgccattacgccacgcactaaagccatcattccggtgcattatgccggtgcgccagcagatattgacgccattcgcgccattggcgaacgttacggcatcgcagttatcgaagatgctgcccatgccgtcggtacgtattacaaagggcgacatattggcgcaaaaggtaccgctatttttagttttcatgccattaaaaatattacctgtgctgaaggtggcctgattgtaactgataatgaaaaccttgcccgccagctacggatgctgaaatttcacggtctgggtgtcgatgcctatgacagacaaacctggggccgtgcaccgcaggctgaagtcttaacaccgggctataagtacaatctgaccgatattaacgccgcgattgccctgacacagttagtcaaattagagcacctcaacacccgtcggcgcgaaattgcccagcaatatcagcaagcactggcagctctcccctttcagccattaagccttcccgcctggccgcacgttcacgcctggcatctgtttattattcgtgtcgatgaacaacgttgtggtatcagtcgcgatgcgttgatggaagcgttaaaagaaagaggcattggtaccgggttacatttccgcgccgctcacacacaaaaatattatcgcgagcgttttcccacgctgagcttaccgaataccgaatggaatagcgaacgcatctgttctttgccgctgttcccggatatgactaccgccgatgccgaccatgtcatcacagcccttcagcaactcgcaggacaataagccatgtttgaaatccaccctgttaagaaagtcagcgtggttattcccgtttataacgagcaggaaagcttaccggaattaatcaggcgcaccaccacagcctgtgaaagcttggggaaagagtatgagatcctgctgattgatgacggcagtagcgataattccgcgcatatgctggtcgaagccagtcaagcggagaacagccatattgtgtctattttgcttaaccgcaattacgggcaacatagtgcgattatggcgggattcagtcacgttactggcgacttaattattacccttgatgccgatctccagaatccgccagaagaaatcccccgcctggtggcaaaagccgatgaaggttacgacgtggtagggactgtacgccagaaccgccaggacagctggtttcgtaaaaccgctagcaagatgattaaccggcttattcagcgcaccactggcaaagcgatgggtgattacggttgtatgctgcgcgcctatcgccgtcatattgtcgatgcgatgttgcactgccatgaacgcagcacctttatcccgattctggcgaatatcttcgcccgccgtgccattgaaattccagtacatcatgccgagcgtgagtttggtgaatccaaatacagttttatgcgcctgattaatttgatgtacgacctggtgacctgccttaccacaacgccgctacgtatgctgagtctgctcggcagcattattgcgattggaggttttagcattgcggtgctgctggtgattttacgcctgaccttcggaccacaatgggcggcagaaggcgtctttatgctatttgccgtgctgtttacttttattggcgctcagtttatcggcatgggattactcggtgaatatatcggcaggatctacaccgatgtccgcgcccgcccccgctattttgttcagcaagttatccgtccatccagcaaggaaaatgaataatgaaaaccgtcgtttttgcctaccacgatatgggatgcctcggtattgaagccctgctggctgccggttacgaaattagcgccatttttacccatactgataatcccggtgaaaaagccttttatggtagcgtggctcgtctggcggcggaaagaggcattccggtttatgcgccggataacgttaatcatccgctgtgggtggaacgcattgcccaactgagcccagatgtgattttctctttttattatcgccatcttatttacgacgaaattttgcagctcgctcccgcaggtgcatttaatctgcatggtagcctgttaccaaaatatcgtggtcgcgcgccgctgaactgggtgctggtcaacggtgaaacggaaactggcgttacattgcaccgaatggtgaaacgtgccgatgccggggccattgtggcgcaactgcgcattgccattgcgccagacgatatcgctattacgctgcatcataaattgtgccatgccgcgcgccagctactggaacagacattacccgccattaaacacggtaatattctggaaatcgcccagcgcgaaaacgaagccacctgttttggtcgcagaacgccggatgacagtttccttgaatggcataaaccggcatccgtactgcacaacatggtacgtgccgttgccgatccgtggccgggtgccttcagctatgttggcaatcagaaattcaccgtctggagcagccgtgttcatcctcatgccagcaaagcacagccggggagcgtgatttctgttgcgccactgctgattgcctgtggcgatggcgcgctggaaatcgtcaccggacaggcgggcgacggcattactatgcagggcagccaattagcgcagacgctgggcctggtgcaaggtagtcgcttgaatagccagcctgcctgcaccgcccgacgccgtacccgggtactcatcctcggggtgaatggctttattggcaaccatctgacagaacgcctgctgcgcgaagatcattatgaagtttacggtctggatattggcagcgatgcgataagccgttttctgaatcatccgcattttcactttgttgaaggcgatatcagtattcattccgaatggattgagtatcatgtcaaaaaatgtgatgtcgtcttgccgctggtggcgatagccacgccgattgaatatacccgcaacccgctgcgcgtatttgaactcgattttgaagagaatctgcgcattatccgctactgcgtgaagtaccgtaagcgaatcatcttcccgagtactagtgaagtttatgggatgtgtagcgataaatacttcgatgaggaccattctaatttaatcgtcggcccggtgaataaaccacgctggatttatagcgtaagtaaacaattacttgatcgggtgatctgggcctatggcgaaaaagagggtttacagttcaccctcttccgcccgtttaactggatgggaccacgactggataaccttaatgcagcgcgaattggcagctcccgcgctattacgcaactcattctcaatctggtagaaggtagtccgattaagctgattgatggcggaaaacaaaaacgctgctttactgatattcgcgatggtatcgaggcgttataccgcattatcgaaaatgcgggaaatcgctgcgacggtgaaattatcaacattggcaatcctgagaacgaagcgagcattgaggaactgggcgagatgctgctggcgagcttcgaaaaacatccgctgcgccatcatttcccaccgtttgcgggctttcgcgttgtcgaaagtagcagctactacggcaaaggatatcaggacgtagagcatcgtaaaccgagcatccgcaatgcccaccgctgcctggactgggagccgaaaattgatatgcaggaaaccatcgacgaaacgctggatttcttcctgcgcaccgttgatcttacggataaaccaagttgacctaagatcttacggataaaccatcatgaccaaagtaggcttacgcattgatgtcgatacctttcgtggcacccgtgaaggcgtgccgcgtctgctggaaatcttgagtaagcataatattcaggccagcatttttttcagcgtcggcccggacaatatgggccgccatctctggcgactggtgaagccacagtttttgtggaagatgctgcgcagtaacgcggcaagcctttatggctgggatattttactggcaggtacggcctggccaggtaaagagattggtcatgccaatgccgatatcattcgtgaagcggctaaacatcacgaagtcggcctgcacgcctgggatcaccatgcctggcaagcccgtagcggtaactgggatcggcaaacaatgatcgacgatattgcacgcggtcttcgcactctggaagagattatcggtcaaccggtaacctgttctgccgctgcgggctggcgtgccgaccagaaggtgatcgaagcaaaagaagcgttccatttgcgctacaacagcgattgtcgtggggccatgccgttccgtccattgctcgaaagtggaaaccctggcactgcgcaaattccggtgaccttacccacctgggatgaagtgattggtcgggatgtgaaagcagaagattttaacggttggttactcaaccgcatcctgcgagataaaggcacgccggtttataccattcatgcagaagttgaaggctgcgcttatcagcataattttgtggatctcctcaaacgcgcagctcaggaaggcgtgacattttgccctttaagcgaactgttaagtgagacgttgccgctcggacaagttgttcgcggaaatattgccggacgtgaaggctggctgggttgccaacaaattgcgggtagtcgctgatgaaaagcgtacgttaccttatcggcctcttcgcgtttattgcctgctattacctgttaccgatcagcacgcgtctgctctggcaacccgatgaaacgcgttatgcggaaatcagtcgagaaatgctggcatccggcgactggattgtgccccatctgttagggctacgttatttcgaaaaacccattgccggatactggattaacagcattgggcaatggctatttggcgcgaataactttggtgtgcgggcaggcgttatctttgcgaccctgttaactgccgcgctggtgacctggtttactctgcgcttatggcgcgataaacgtctggctctactcgccacagtaatttatctcagtttgtttattgtctatgccatcggcacttatgccgtgctcgatccgtttattgcattctggctggtggcgggaatgtgcagcttctggctggcaatgcaggcacagacgtggaaaggcaaaagcgcaggatttttactgctgggaatcacctgcggcatgggggtgatgaccaaaggttttctcgcccttgccgtgccggtattaagcgtgctgccatgggtagcgacgcaaaaacgctggaaagatctctttatttacggctggctggcggttatcagttgcgtactgacggttctcccttggggactggcgatagcgcagcgggagcctaacttctggcactattttttctgggttgagcatattcaacgctttgcactggatgatgcccaacatagagctccgttctggtactacgtgccggtcatcattgccggtagcctgccgtggctgggattactccccggtgcactgtacacaggctggaaaaaccgcaagcattccgcaaccgtctatttgttgagctggacgataatgccgctgctgtttttctccgtcgctaaaggtaaattgcccacctatattctttcctgctttgcatctctggcaatgctgatggcgcattacgctttgctggcagcaaaaaataatcctctggcgctgcggattaatggctggattaacatcgcttttggcgtcactggcattattgccacatttgtggtctccccgtggggaccaatgaacacgccggtgtggcaaaccttcgagagctataaagtcttttgtgcctggagcatttttagcctatgggcatttttcggctggtacaccttaacaaacgtcgaaaagacctggccttttgccgcgctttgcccgctggggctggcgttgctggtaggatttagtattcctgacagagttatggaaggaaaacatccgcaattttttgtcgagatgacacaagaaagtcttcagccaagccgctatattcttactgatagcgtcggtgttgccgcaggtctggcatggagcctgcaacgcgatgacatcatcatgtatcgccagacaggtgagttgaaatacggccttaattatccggatgcgaaagggagatttgtcagcggtgatgagttcgcaaactggcttaatcaacatcgtcaggaggggattattactctcgtgcttagcgttgaccgcgatgaagatatcaacagtctcgccattccgcccgcagatgccatcgatcgtcaggagcgtctggtgctgattcagtatcgtcccaaatgatctggctaacattagtctttgccagcttgcttagcgttgccgggcagttgtgtcagaaacaggcaacctgctttgtggcgataaacaaacggcgcaaacatatcgtgctgtggctgggactggcgctggcttgtcttggtcttgccatggtgctctggctgctggtcttgcagaacgtaccggtaggcattgcttacccgatgttaagtctgaattttgtctgggtgacgctggctgcagtaaaactgtggcacgaaccggtaagcccgcgtcactggtgtggggtggcgttcattattggcggcattgtgaacctcgggagtacggtgtaatgggcctgatgtggggattattcagcgtcattattgccagtgttgcgcaattaagcctgggttttgcggcgagtcatctgccgccgatgacgcacttatgggattttatcgcggctctgttagcttttggcctggatgcccggatactgttactcgggctgctgggttatctgctttccgttttttgttggtataaaacgcttcataaacttgcgctaagcaaagcctatgccttgctcagtatgagttatgtgctggtatggattgctagtatggtacttcccggctgggaagggacttttagcctgaaagcactactgggagtagcctgtattatgagcgggttgatgctgattttcctgcccacgacaaaacaacgttactgagttttccctgccactttacactgccgttcccactcatcggggctataactgcttgcgctgaggactttcaccgtatgcagcttttcacgattaatacaataaagcgcattctgcaaagggctgagtaaatcccccactttcacggcgaagtcactcttcacttcggcgatcatttttatcgcgccgccagcatcgcagagcataagtacatgtctgttatcttgtttattgcagcagctttttttgaccagccattccattgcattatcctgtttgctaagagttttcacatcaatttacagattaacagataaactctttatcaacggcaatggaatggcagaaatgagaagtgaaacggagggttaattattgctgacgttgcacccactcttttagcgcctgacgactaattttaataccgccgtttttcagctccggcggcagagttagccagcgcaccggttgttgaaaacgggccagcttatctttcacccattcactaagatcaacgctctcgtggtcatactccatcaccgccaccggtcgatgaccaaactccttgtcggcaacggggacgataaacacctgcaaaaccgcaggatgtgcagcaattacgcgctcgacttcttccggctgaataccctctccgccactgaagaatagattgtctaaacgtccgacaatggtcagcttgccattatgcatctcaccgcgatcgcgcgtagcgtaccagccttcgtcattaaccagactaaccagttgcccgttacgccagtaaccttctgccatactggcagcccgcagccacacttcattattaacgattttcacttcccgacccggcagcgggctaccaacgtctgccaggccgtcggcttctttcgcacacaccgtggaggcaaactcggtcagaccatagccgcaaaagcaacgaatcccctgctcgcgcgcctgttccgtcaactcgaccgggatagccgcgccgccaagtaacaccgctttcagggaaacggaactacggttaaccagcaaacgccagagttgtgttggcaccagactagcgtgagtacagcctgccagcatttgctccaatggctgtttatcacgtaccgtcatccgcgcaccagcgtataaccagcgccacataattccctgaccggagacgtgaaacagcggtaaagagagcaaccaatcatcgtgatcgccaaacggaatcaggcttaacacaccttgcgcactggcaagatgggcctgataagtatggacagcggctttcggcaaaccggtagaaccgctggtcaacgtcatactgcacagacgcgtcggctgccacgtagcggcatgtgcgccttcaaccagctgaatgtgcaggctcgttaatgccggaaacgtgttttccccatccggcaccagagcaaattgcagcgtcagattgggcagcaattcttcaagcaacggttgcggcagctgagggttcacgggcaacacccgcgccccgcattgcagtaacgccagccaggcgagcagcgtttgcggcgtattccacgcccgcaacatcacgccgctgccctcaaccaccccctgcaccgcaaatccggaggctaattcatcgacgcgagcacaaagctcgcgccagttgagttgctcgtcattaagacgtaaggcgatggtttctccccgcacttgccgccagtgacgccacggccagtcagagaagatcataacaaccgctccagtgcatcaacttccacgacaggcagcgtgctacccggccagcgacgtacctgctgcgcctgcatcagatccagcgtgtccagccctggaatggtgtccggcgttaaccaggcggcaatccgcgccagttgcgttaagcctaagctgctttcaatggaagaactgatcaccgccgtcagccccagcgcgtgcgccgcctgtacctgctcgcgtactttttccagactgcccgtgagcgtgggtttgataactaccgcgcgcacgccctcttcagccacaaaggcaaaatccggctcgcgcaggctttcatcccaggcaatggcaatgccggtttcacgggcaaacgctcggctatcatcgcgggttttgcacggctcttcgagaaacgcgatgcggtcgcgataatccgggttaacgtatttggcaaactgctgacctttcagcggtgtccaggcgcgatttgcgtcaagacgcaaatgcagatccggaattgcctccagcaacagattcaccaccatgccgtcgcgcaccgcttcgtacaatcccactttgaccttcgccactttctcgcctggcatatctgcaagtttgaggatcagatcgtccggatcgccattacacagcggtgccgcacggtagttggctgcttgcggcaacgtatctgtcagttctgccaatgcacagcttacgccaaaggccacggaaggcatctgcggtagctcgcaatcgcctgccagccagttatttacccaggcaagcagcacactttgcgcctcttcccaggtttcctgactgaagcccggcagtggggagatctccccccacccttcgcgctcgccttcacgcaggcaaacatacagcccgtcgcgggtttttaaccgcctgtcgcgcagaaccacccccgcgtccatggggatctgccagcggtatacctgcgcgctacgcattacggattccgtttgaatttgctgaagtcaggctgacgtttctggttgaaggcgttgcgaccttcctgaccttcttccgtcatgtagaacagcatggtggcgttgcccgccagctcctgcagccccgcctgcccgtcacagtcggcgttcagtgcagctttcaggcagcgcagcgccatcgggctgttttgcagcatttcgcggcaccaacggacggtttctttttccagatccgccagcggtaccacggtgttcacaaggcccatatccagcgcctgttttgcgtcgtactgacggcacaggaaccagatttcacgcgcttttttctgcccgacgatgcgagccatgtaggaagcgccccagccgccgtcgaaggaaccgactttcgggccagtctgaccgaagatggcattatctgccgcgatagtcaggtcgcacatcatgtgcagaacgtgaccgccgccgatggagtagccagccaccatcgcgacaaccggtttcggacaggtacggatctgacgctggaagtccagcacattcaggtgatgtacgccggaatcatctttatagccgccgtaatcaccacgcactttctggtcaccaccggagcagaacgctttatcgcctgcaccagtcagaatgatcacgccgatgttgtcgtcataacgcgcatctgccagcgcctggatcatctcttttaccgtcagaggacggaaggcattgcgcacctgcggacgattaatggtgatttttgcgataccgtcggtggatttttcataacgaatgtcctcgaaaccttcggagcagtcgtgccattcaaccggtgcgtaaagcattgcttcatcaggataaatcatattgtgtcctttagtcagaaacgcaagatctgcgccagacttgcgattacgccagcgggattttcccgatgcgcgttatgtccggcgcgaggaatgacatggcagtcggcagccagttccgccgccagggcgcggaatttgctgtcacgttcaccacataaataataaaacgcaaatgtgcgggcgctaaggttagcacgtaaatcaggctggacggcgagagaagtcgcctccagcatggcggcaagcgttgcgccattattgttgctgcgcagcgccaccagctcccggcgttgatcgtcattgagactggcaaaaacaggctgttgataccagtcggcaaataccgccgttaacggttctgtgagaaaacgctgcacccattggcgatcggaacgctgacgttccgcacgttgttcagcattttgcagccccggatgcccgccttcgacaataaccccacaaagccccgccagcccctggcaagccgccatcatcgccacccgtccaccaaggctgtaccccaccagccagaagtcaaggatgttgtaactaaccaaggttttacgcagtaagtcggtgacatcatcaaatccatcgacgctaatcgccgcgctaccaccgtgacctgggagatcaacatacaaccgactgtagtcggcaaacgcctcgcccacttcttgccattcgtggcaatcgccggaaaaaccgtgcaaaaacaccagccagggtaaacctggttttccgtgttttgcctgcgcgtgcaggatcataaatggcttacctgcgccagaagttgctggagcgtttgcgcaccatcggtgtcgttaaccaccatttcaatcaccgtggtggttggcgtgcgccaggcgtcggcaaatgccgtttcaagttcctgccagttttgcggacgatgatatttcagctcgaacatcgcggcggcgtgctcaaaatggacgttttgcggcatcagatagaaacgctcacgctcgctttgcggcgttggcaacaggctgaaaatttgcccgccgttgttgttcaccacaattaataccagcggcgcagaaacctgacgcaataacgccagcgcgttgagatcgtaaagtgcggagagatcgcccacaatcgccagcgtcggtttgccgcttgcccgctgaacgccggcggcggtgctaagcagcccgtcgataccgctggccccacggttgctgtacaccgggtaacctgccggaagttggctaagcgcatcaatcagacgtaccaccaggctgttaccaacaaacaattgcccctgttcaggcagatagtcgcagatgcgatgcgccagttgcgcttcgccaaacgcatcacggcgggcaataaccgcctgcattgcctgttccgccaggcgcgggatttcaacgcaccagggctggcgtttttctgccggatgcagctccagccagtcggcaatattggcaattaagcgacgtccgcgatggtgtgccggatcaagtcgcccttcaatgtcatcaacaatccagtactcttctggttcacagcttgcctgccattgcaggagccgtttccccgtcaggctgcttcccagttgcaccacaatttgcgcctgctgcagctcgctggtcgctttggcattgcctaaccaaagatcggcacacggcagcggctgcccggtttgactcagcacatcgccaatcagcggccagccaagagtttgcgcccacagggcaacttttttgccctcttccgcactcatgcgcccggcaaccaccacgccgcgcttttgtcgccagaagaaccagtcgcgctgtttttcactttccagacgaggcgcttcacgcagccacggtttgtcttcctgccaccagtcacccagacgctgttgccagctaagcccggtatcgtccatttcgccatacagcggttcagcaaacgggcagttgatatggactccccccgcatgaagcgtaccgagagcgtggtcgatggtagaaaccagccaacgtgcggggatatcctgggtcgggcgcggcaaactaatactgtgcgtggggtgagaggcgaacattcccggctggcgaattgcctgattcgcgccgcagtcaattagctccggcgggcgatcggcggttaagagaatcagtttttctccggttaacccggcttcaatcagtgccggatagagatttgccaccgccgtgccggaggtcacaatcaccgccaccggctgcttgctgactttcgccagccccagcgccagatgccccaacccacgctcatcgaaatgggtgtggtgaatgaatgcggaattctccgccgccgctaacgttaacggtgtagaacggctgcctggggcgatacagatgtgtctgacgccgtgacgcgttaatgcttccagaatgaccgccgcccagcgtcggttaaatgcgcttacactcatgagtttgtccggtatcaatattgcggctaagtataaggagctacaaaaatagattattgatatgaatcggtaatgatgcgactcattattattccatttgtaataaagtacgcagccctgccgctttgttgtcgatttcctgccactcttgctcggggtcggaaccacggacaatgcccgcgccagcatataatcgcacgacattgccgctaatttttgcactgcgcagggaaacgcagaattcgctttgttgtaaactgagatagcccgcagaaccggcgtaccattctcgggtgaacggttcgtgacgggcgataaactgtcgcgccagatcgcgcggtaagccagcaactgctgccgttggctgcaactgatgtaaacagatcacatcatccgctttgttgagactagtccagatacagcggcgaagatgctgcactttacgcagacgcagtacctgcggcggtaaaacatccagcgtctgggtatcggcctgtaatcgttgacagatatcttccaccaccagcatgttctcgcgctggtttttatcatccgccatcagccactctcctaactgctgcgcctgcttatcatcaggattatttgctactgttcccgccagcgcttcagtacgcagcgctttgtcacgccgccgccataaccgttccggactagagccaagaaaagcattttcgccatcaaaggccatgtaaaaatggtagcaattcagattcagtcgacgactggcagccatcatcgccgccgcgttgaccggacttgcgaaatgcaggtcagttgcccgagcgagcaccactttgtcgagctcaccttcggcgatggttttcgttgccagttcgattaattgcgtccagcccgttttgtccggccagtgttgttctcgcgtggtggttaaatgtaacccaggcaagggcttgatactcaccagtgtggcgataaattcttttgcctgaatcgcatcgtgctgaagggagctttcgctgaatagcgtcagccgcagcgtggctttaccgccacagcgtcgccattccaggcggggtaaaagtaaattgccctggctcgggtcaaaagcattcagcccccaaatgcgtaagtcggcgtgttccgggtgctggcgaagaaaacgttgtgcctggtccaagctcgtaaaacgggtaatcgcgcccaggacgacagcttcttcatcaccattacgttgttgccagtagaattgcgggtatgtttgctgactggccagccagctcaaggcatcaaaagcgtctttgagagggaaaggaatatcgataacccgaatgccgggtgtcgccggaatctcttggctcaaatggcgcagtagattttccagcgccgtagtaagactttgcacgcggacctctccctgttaaaagcctcacattatacggggtactacaaaaaaaatgcagtaccccggtgtagggaggttttaacggcgtgccagcaacagtcctagtaccagcccaacggccgcgcccacaccaattccttgccagggtttttcgtggacgtagtcatcagcacgataaactgcctgcttcgcccgatagtaataactgtcactagcctggctaacccgttttttcacatcatccagcgctttttctgcacgcgctttcagctcaacatatttctgatcggcgggatcgccagaggagcggagcacctcttccagtgtttcactaagcagcgtcaggtcgtcatcgatacgtgtatcaccaaactgattagacattctcgttctccatttgcgtaaaacctgtcactaactatagacaagggttgttgattacgcctgaattacctcgcgtgccatcccaatgtgtgggataccatcttcttcatagacctccgtcacagggataaaaccgaaactctggtagaagttttgcagatgcgcctgcgccccgaggtaaacaggcttatcaggccagtgatgcgtacatgtttcgagtgttttactcatcagctgctgccccactttttcgccacgcaacgcttcactgacaatcacccgacctataacgaccggctcaagatcatcatcacttttcagaatcctcgcatacgccaccagttcatcatttttccaaccgagaatatggcgattatcccccgtcaaatcatcaccatcgatatcctgataagggcaattctgctcgacaacaaacaccgcgcaacgcagttgtaataaggcataaagctgggaaacgcttaattcagagtgatgcagatcttgccattcaatcataatgctctccttttagatgtatgccttatactagccggaatattttttgaaacgtgatgaactcatggaattaatttttttaggtactagtgccggtgtgccaacccgcacgcgcaatgtcacggcaatattgcttaacctgcaacatccgacccagagcggactttggttgtttgactgcggtgaaggcacccagcatcagctactgcataccgcctttaaccctggaaaactggacaagatttttatcagtcaccttcatggcgatcatctttttggtttacccggcttgctgtgcagtcgttctatgagtggcattatccaacccttaacgatttatggtccgcaaggtatccgtgaatttgtggaaaccgcgctgcggattagcggcagttggaccgattatccgctggaaattgtcgaaattggcgctggcgaaattctcgatgatggcctgcgcaaagtaaccgcttatccgctggaacacccactggaatgttatggctatcgtattgaagaacatgataaaccgggtgcattaaatgcccaggcattaaaagctgctggcgtgccgcctggcccactgtttcaggaattaaaagcgggcaaaacaatcacgctggaagatggaaggcagattaacggcgcagattacttagctgctccagtgccaggtaaagcgctcgctattttcggcgataccggcccctgcgatgccgcacttgacctggctaaaggtgtcgatgtcatggtgcacgaagcgacgctggatataaccatggaagccaaagccaatagtcgcggccatagctctacacgccaggctgcgacactagcccgtgaggctggagtcggcaagctaatcattacccacgtcagcagccgctatgatgacaaaggttgtcagcacctgttacgtgaatgcaggagtattttcccggcgactgaactggcgaatgatttcaccgtgtttaacgtttaactctgcttattattaaaaacagggcgaaacttgccctgttatcgcaacccgcgctacatatatccacccacacaggcatattgagcgatttttgatatttattcatctccttacgcactatattcagagcaataagttgcctcttttcatcttgattcagcacaacctttgcaactaaaaggagcccatgatggttacagttgtcagcaattattgtcaattatctcaaacgcaactcagtcagacatttgcagaaaaatttactgtgaccgaggaattactgcagtctttaaaaaaaacagcgttatccggagatgaagaaagcattgagttactgcataatattgcgttaggttatgataaatttgggaaagaagctgaagatattctttaccatattgttagaaccccaacaaatgagaccctaagcattatccgacttatcaaaaatgcttgtttaaaattatataatctggcacatatcgcaaccaactcccccctcaaaagtcatgatagtgatgatctcctgttcaaaaaactattctcccctagcaaattaatgacaattatcggtgatgaaattcctcttatatctgaaaaacagagccttagtaaggtgcttttaaatgatgagaataatgaactgagtgatggtacaaacttctgggataaaaatcgtcaattaaccacagatgaaatagcttgctatcttcagaagatcgccgctaatgcaaaaaatactcaagtcaattatcctactggtctctacgtcccctactccaccagaactcacctggaagacgctctcaatgaaaatattaagagcgatccaagttggccgaatgaagtccagttattccccataaatactggcggacactggatattagttagcctacagaaaatagtaaataaaaaaaataataaactacaaataaaatgcgtcatattcaacagtttgcgtgcactaggctatgataaagaaaatagtcttaagcgtgtcattaatagttttaattctgaactcatgggagaaatgagcaataataatataaaagttcatttaaatgaaccagagataatatttttacatgccgatcttcagcaatacttaagccaaagttgcggtgcatttgtgtgcatggcagcccaggaagtgattgaacaaagggaaagcaattctgacagcgccccctatacgttattaaaaaaccatgctgacagatttaaaaaatatagtgcagaagagcagtacgaaattgattttcaacatcgactggcaaacagaaattgttatttagataaatatggcgatgcaaatatcaatcattattatagaaacttagaaataaaacacagtcaacccaaaaatagagcatccggcaaaagagtgagttaacatcattgttaattaattcgaccagtcagcaaatatgctgactggtcgaacatagtttgctaaacagtcatcactgactgatgtcagtcacaccatccgccagttcaatcaggcgaataaattccgccctgtaaccctgtggatcttccccttttgcctgctgagcccactgtttgatctgctgccaggaggtattgttcaggtattcagaaccgcgtaacttttgcccatatgcagctactgctgcgcgaaaacgcatatcttcagagggcgcgtttattgttggccccagcgggaattcaactaactgactttcttttccctgcgggtatttccagcgaatttttaaccaggccagttctttcgttttgtcgcttttcgctaatttgttatccggggcatagcgtaacttatcaatacttgctttttgcccgttcagcgttaattcgaataacaacgttatatgtttgcctgcgcctatatcccctgcatcaacgttgtcgttattaaaatgttccacccgaagttggcgcttttcataaccaatctgacggtattccgttacccacgcggggttaaactcaatttgcgctttgacatcttttgctacggtaatcaacatctgccgcatttcactattcaatactttctgcgcttcagagagggtatcaatgtagctgtagttgccgttaccaacatcggcaattcgcaccatcattgcctcgttgtaattgctattccccacgccaaacgtgctcagagtaacaccagactcccgctgttttttgaccatactttcaatgctttttggatcgtcaatgccaacgttaaagtcaccgtcagtggctaataaaatgcgattgatgccgcccttaataaaccccttcgtcgcctgctgataagccagttccagcccggcaccgccattggtactgccttcggcatccaggctatcaattgcggcattaatttccgccttatgactcccggagatagaaggcaatgcaatacgggagtcgccagcgtaggtcacgatggcaatgttatcctgctcacgaagttctttgaccaataatttcaagctagactggataagtggcaaacgttcatcagaaatcatactaccagaagtgtcgataagaaagaccagattagaagctggtaactcttcacttttgcgatctttcgccaggatatcaactttcagcaatgttcgctgttcattccatggtgcaggtgccaattcgtagcgcatagcgaaaggtattggcttagaggccggaatagattgtttgtctttgatatcccaatcagacgggaaataattgactatctcctccacccgcacagcgtctggcggaggtaacagcccttgattgaggaaacgccttacattcgcataactgccagtgtcaacgtcaagactaaacgtcgccaacggattttgcgctacctgcttaaccggattatcatcgaactgctggtagcgagcggttcctggatttgcgatatgtgtagcttttgctttagccgctcttgcaaatgttggcgcttcctgcaatcgcccctgtaaagcctgtttgtcactatattgttgcacttcttgctgggccaaggctttcgcggcggcggcgctttgctcagcctcttttattgcagcttgctgcgcggcaagcacttgctgctctgtgggagtactgggttgttgttgctgactttccttattctcaggttgcggcccacatccactcaaaatcaaactactcataagcaacatgattatatttttatttcgcatataaaatccttttaaataaactcaggcaccagacataaaatatactctttgtataatcctgctaatcttaataaaatacaatatcgaaacccatagcaaataatgattcaacaacgcaacccattaataatttgcatatgaaaaaaataatctttgcttttattatattatttgtgtttttactccctatgattattttttaccaaccctgggtcaatgcattaccgagtacgccccgacacgcaagtcctgagcaattagaaaaaacagttcgttatcttacacaaactgtgcatccacgtagtgccgacaatattgataatctgaataggtccgcagaatatataaaagaggtctttgtcagtagcggtgccagagttaccagccaggacgtccccattacgggtggcccctacaaaaacattgttgctgattatggtcctgccgatggaccgctgattattattggtgcgcattatgactctgccagcagttatgaaaacgatcaattgacctatacgccgggcgcggatgataacgccagcggtgtggcaggattactcgaactggcacgtttgttacatcagcaagtaccgaaaacaggcgtgcagctggtcgcctatgcgagcgaagaaccgcccttctttcgtagcgatgaaatggggagcgcggtgcatgcagctagccttgagcgtccagtgaaattaatgatagcactggagatgattggctattacgactctgcgcctggaagccagaattacccttacccggcaatgtcctggctttatcccgatcggggagactttattgccgtggtcggcagaatacaggatatcaacgccgttcgtcaggtaaaagcggcattgttgagttctcaggatttatctgtttattctatgaataccccagggtttattcccggtattgatttctctgaccacctgaattattggcaacacgatattcccgccataatgattactgacaccgctttttatcgtaataaacaataccacttgcccggtgataccgcagacagattgaattatcagaaaatggctcaggtagtggatggtgttataactttgttatacaacagtaaataataaaaatttctcgaggcgggtccagaaaaagcgacatgcacattttattttccctcatctgttttaagatgcgaaacatgaaattcaacggaggaaaaataaatgggaatgattggctattttgcagaaattgacagtgaaaagattaaccaactgcttgagtctactgaaaaacctttgatggataatatacatgacacgcttagtggattacgccgactggatattgataaacgctgggattttttacactttgggctgacaggcacctctgcttttgatcccgcgaagaatgatccgctgagtcgtgccgtgcttggtgaacacagcctcgaagatggcatagatggcttccttggattgacctggaatcaggagttagccgcgacaatcgaccgactggaaagtctggatcgaaatgaactgcgtaaacagttttccattaagcgactcaatgaaatggagatttatccgggagtgacctttagtgaagagttagaggggcaactctttgccagcatcatgcttgatatggaaaagctgattagcgcgtatcgacgtatgctgcgacaagggaatcatgcgctgacggttattgttgggtgatatagcttgatgcctgggggagaaagacccattagttaagatttacgccaggatcatcttgaaaaaatctttaaccatggtccggtttttatccccttgtataaatattactaaatgcttgcttagtcgcattgttaaatgcaataccgtatattcggtatgtaacagcgatatcctctgtgctggcaacgatctgtcatgcttgatgaaaacggaattgaacctgtcattaccaggtagataaaaagcctgttcaattttgggattattttttataactcgtgtctgttatggcgacacgggaaaacatcaatattgtccttcacaaattgcagtaatatagaatcaacctctcttgcaagttggtcacaatgtattataagcattttgaatatgtcatcctctgtaatctcgtgaaaattttcggccttgtcttttagctcatcatatcggattcttgcagtaaccattttttgggcgagttctaataaccccaaagcttgcaattgctggtgagtatgatcactttcaaaaaatatcccacactccattccttcccaaccaacatattcatgccattcataaaccagcataaatgtttgtaaaactggcggtaataattggatatctgcaaaaccaaaccaaaacttacgcttgagatcccactcatattcaatcgccaatgctatattgtttaaggcatctccggcatccttatttttacgcaaaatcaattccgtcagtgtatagcgttgttcatcaatacgccgaagagcttctgcaatatcatagtttgtagccaacaaaacattctctgcttcctgatgagtgacgtctgcttttgccgtcaatatattgatttggtcaatatgaaacaacttgatggcttcatcaacatcaccgccagtcctctctaacaaacgtctggcaacctggataccgacaggtacgttcttccgaagtttacgaatttcacttaaccattccatgtcaaacccctttaaatatttatgatattaaatataacaacgtctggataacgacccggcctgactgaatatctcacgttttcctgcttaacattcatgttatgatgctcttgaaactaataatacgtatggaattgtcactatttatctgctaatgaatagtaacaatgtcattcgtttgatgaatatattatttcagggaataattatgacacctttagaacgcattacccaacttgttaatatcaatggtgatgttaataatcctgatactcctcgtccattgttatctcttgaggatttttttattgacaataatatccatggtagtatatgttgcaatgtgattccagaacaatctccgcaagctatctatcaccattttctgaaaatacgtgagcgtaacaatgttagtgatgttttggtagaaattacgatgttcgatgacccagactggccctttagtgaaagtattttagttatcaccactgctagtccagaagaagttcagagctggtttgtagaagaaattgcccctgatgagtgctgggaaggatggagtgaagatacggagcatggatgggttgaagtccctgtgggtatgcatccggttacttgttggtgggattaaaacatttatataaacagataagcggatgtttacataaatttttatgtgaaggaacatgatgaaacttattcctcgcagtagtgatattagtcctggcattgatggaatttgcccggggccttttcctccgaacggatttaccgtacttacagatgcagcatatggtaacggagactgtttcggtttgtactggcctattggtcaggagcataaactacctatagtgtgcgaaacgtaccatgacgaatggcgaatcgtacctgccttttccagcattaagaagttcgaagaatggctggaagtgaatgatgatgatccccatgaaaatggcatcagcatcgaagatcaagactttgcagcaaatctcttccgtgttgctcggaaatgtcttagtacgggaaggcttgatgacgcactgccactgttacagcgagcaacagaacaattgcctgaagtcagcgaatattggttagcactggcaatccagtatcgccgatgtaaaaaaacagaagctgcagcacaggctgcgcttaatgcttatcttggcaattgggcatttggtgttcctgacaataaagtcattcatttgctgagtcaggccgcagatgtcccgaatttccaggatgatcctgtgattcagtgcattaaagaacaaggattagatcttagctttggaggaacaaaggaaaataataattaccccttgatgcagatgtgtgttgatacttattttgcgcagagaaaaccgcttcaggcattaaccctgttacataattatgcctggataatgtccagtgaaacgactgcatttcaggaacgctatgattttaatatcgatgaatggcgggcaaaattcaggcagttatgtttagagtattttggcgatagtcgtacacagttcacttaacgctctgcgtctatctactatcccttctttttcagaaaaaccgccgagcatgtcggcggctttctgacttacaaagtaacagattacatcagcggcattgccaaacgcacaatgctaatcagcggttgtggccatacacccagcaccagtaccaacagtgcagagatcagcacaacgataccgcccgcgctgtactgccagttacttggtgcatcgcgacccggttgttccggggcgtgaagatacaggctcaccgccacgcgcaggtagtagtagaggccgattgcgctaccgacaaccacggcacccaccagccaccacaagtgtgcctggacaccgaccgccagcacgtagaacttaccgataaagcccagcgtcatcgggataccggccagagacagcatcatcaccgtcatcactgccgcgaggatcggacgatgccagaacagaccgcggtaagagaacagggaatcagcatccgggccacgatacgggctggacatcaggctgaccacgccgaacgcgccgaggctgctgaacagataaccggccaggtaaacccctaccgcttccatgctcatctcgccggtttgcagcgcaatcagcgctaccagcagatagccgaggtgagagatagaactgtaaccgagcagacgtttgatattggtctggctcagcgccatcaggttaccgaagatgatggaggcaaaggcgataatcgccagcaccacgcgaatcgcttcgctgtcacccaccggtgcgtagaggaacagacgcatcaccacaccgaagatagcgattttgctcgccgtcgccaggaaagtggaaaccggcgcaggcgcgccctggtatacgtctggcgtccacaggtggaacggcaccagagagagtttgaagccgaggccaacaatcatcaggccgaaacctgccagcaacagcggctcgttgagcataccgtcgccaaggtttttacccaacgcgacaaagctcaggtcgccagactgcgcatacaccagcgccataccaaacagcaggaaagaagacgctgcggcagaaaggatggtgtatttgatactggcttccagactacgtttctggcggaaagcgtaaccgaccaggccaaacagcggcaaagagatcagttcgataccgaggaacagagacgccagatggttggcattcgccagcaggatcccgcccagcgcggcaattaacaccaacaggtagaactcatccttgttgtcgttatagccttcaagccacgggtaggcgaaagtacaggtggcgaggctcgccaacaataccagcccggtgtaaagcatggcgaaaccatcaacgcgcatcagcggcgtaacgtccatagcgcccgcctggccaacaaaccagagcgaaaccagcgccgcgttaagcccaataaccgagagcgtagcgttgaggaaatgattgcgtcgccacgcaatggagagcatcacaaccaccaccgtcaagccgacgatcagcaacggtagcagtgcgatcaggttttgtggagttattgtcatggcgatttacggccttgtagtagtaacggaattaacaaaccactgctggatattgccaatcgcggagtggctggtatccagaatcggctgcggatagaagcccagcagtaccagcagcaccaccagcaacaggatcataaacagctcacgcaggctcatccctggcagttcctggctggcaatctggcttttcgctttaccgaagtaagcgcgatgtaacatcgccaggctataaacagatgcaaagaccagcccaaaggtagagataacggtaatcaccggtacaacctggaagctgccgaacagaatcataaattcgccgacgaagttaccggtgccaggcatcccaagcgttgccaccgcaaagaacaggctcagtgctggcagccatttcatcttgctccacagaccgcccatcatgcgcatgtcgcgggtatggatacgttcataaagctgaccacaaagaataaacagacccgccgcgctcaaaccgtgcgcaatcatctggattaccgcgccctggtaggccaactggctgccggtgtagatagcaatcagcacgaagcccatgtgggaaacgctggtgtaggcgatcagacgtttgatatcggtctgggcgaaggccatccacgcaccgtagaagatgccgataacacccagccacatagcaattggcgcgaactctgcgctcgcgttcgggaacagcggcagggagaaacgcagcaaaccgtaagcggcagttttcagcaagatccccgcgaggtcaacggaaccggcggtcggagcctgggagtgcgcatccggcagccagccatgcagcggaaccaccggcattttgactgcgaaggcgatgaagaagcccagcattaacaggtattccacaccactggacattggcgtattcagcagctcttcatagttgaaggtccagacgccggtcgcattgtagtgaacaaaaaccagcgccaggatggcaatcaacatcaccaggccactcgcctgggtgtaaatgaagaacttggttgccgccgtgatacgcgttttaccgtcagaggctttatgcccccacagtgcgatcaggaagtacatcggcaccagcatcatttcccagaagaagaagaacaggaacatgtcgatggcaaggaacacgccgataacgccgcccaggatccacatcaggttgaggtggaagaagccctgatatttttcgatctctttccagctacatagtaccgccagcacaccgagcagaccggtcagcacgaccatcagcaggctcagcccgtcaatggcgagatgaatagagataccaaaacgcgggatccacggcatgtcgaattcagactgccactgcggaattccggcggattgcgtcagactataaccgccctgcaaccacagttgcaggctcagcgccagcgtcaatcccatggtgatcagcgcgatccagcgtggcaccttgacgccaaagcgttcggtctgccagcacaggaagccgccaataaagggaattaatattagccagggtagtaacatggcgatctttattccttgtaaaagtcccgtcaggaccggattttcaacgaattctcacgacagaaaattctcttcggactgggggtagtgtcggatgcaccgcgaaggcggcttatccgacctacgttcttatatgcccaggggcaatcccacaatccttaactcaacgcagtaccatcaacagtgccagcaccacgaccgcaccgatgctcatggatgccacataccagcgcagatagccgttctcacttaacagcagacctttacctgcaaagcgggaaaggacagccgggatgttcatcatactgttcagcggatcgcgtttcagcaaccaggcaatacccaggaacggcttgacgaacactttgtcatacagccagtcaaatccccaggcgttgtaccaccaggtgcccagcagacggcccggcgcactgttggcgatggaggtcaccagagtacgtttacccagccacagccaggctgccagcagaatgccgaccaccgcgaccacgccagaggtaatttccagggtcaacatgctgccgtgcgccagttccgtcgtttgcggaagcacgccctgcagcggcggtacaatcagtgcgccaacgaaggtggaaaggatcagcagcacaatcagcggcaggctgtgagttacccctttcacggcgtgagcgtgaatttgttcttttccgtggaagacgatgaaaatcatacggaaggtgtagaggctggtcataaacgcaccgaccagacctgccaccatcagattgatatgaccattcgccatcgcacccgcgaggatctcatccttactgaagaagcccgcagtgaccagcggtagtgcgctcagtgctgcgccgcccaccaggaagcagagataaaccagcggaatagatttacgcagaccgcccatcttgaagatgttctgttcgtgatggcaggccagaatgacggaaccggatgccaggaacagcagcgctttaaagaacgcgtgggtcatcaagtggaaaatcgccgcatcccatgcctgcacgccaagcgcgaggaacatgtagccaatctggctcatggtagagtaagcgagaacacgtttgatgtcggtctgtaccagcgcggcaaaaccggccagcagcagcgtaaccgccccgacaatacccaccagatgcagaacttccggcgtcatcaggaacaggccgtgggtacgggcgatcaggtagacacccgcggttaccatggttgcggcgtggatcagcgcggagacaggcgtcgggcccgccatcgcgtcggcaagccatgtctgcaacggcaactgcgcagatttaccgaccgcaccgcccagcagcatcagcgtcgcccacatcagcatgttattgccgtcagcaaagtgcgctggtgccagttccaccatttcgcggaagttcagggtgcccagttcgttgtaaagaatgaacagtgcgaaagcgaggaacacgtcacccacacgggtcacgacgaacgctttcattgccgctgcgccattcttcggatcggtgtaatagaacccgatcagcagataggagcacaggcccacgccttcccagccgaggtacatcagcagcaggttgtcggcaagcaccagaaccaccatgctggcgatgaacaggttggtgtaagcgaagaagcgagagtagccctcttcaccgcgcatataccaggaggcgtacatgtgaataaggaaacccacaccagtgaccacgctgagcatggtcaggctcaggccgtccagcaccaggttaaaaccgatgttaaagtcgcctacgctcatccacgtccacagcggctggctgtatgtctgctcgccgttagcgaagaaatcaacgccgataaaggcggttaccagcgccgccaggcccacagagcctacgccgacgatcgcgctgacgttttcagaccagcgcccacgggagaatgccagcaggacgaagccaatcaatggcaaaataatggttaaggcaagcatgttcatccgcgcatctcacttacactatcgatgttcaggttctggcgacgacggtgaagttgcagcagcagcgcaaggccgatactcgcttctgccgccgcgaggctgatggcgagaatgtacatcacctgaccgtcggtctggccccagtagcttccggcgaccacgaaggccagcgcggaggcgttaatcatgatttccagaccaatcaacataaacagcagattgcgacggataaccagaccggttaagccaagaacgaataagattgccgcgaggatcagtccatgttgtaaggggatcatgcgtgctcctccgtttttcttttcgcgctgtcgtctttacgattgctcagcacttcacccgcacgctcttcacgaccgacgtggaaggccacaaccagacctgcgagcagtagcatagaagccagttccaccgccagtacgtaaggcccgaacagcgtaatacccactgctttagcactgattggcgtaccgtcgataccctgatcgttaacaccgaggatggcgtaaacaatcaccaccagcatgatggcgctcaaaattgccggaccaatccacacctgcggtttcagccactggcgttcctgttcgatttcactaccgcccaggttgagcatcatcaccacgaacacgaacagcaccataatggcacccgcgtagacgataatttccagcgcaccggcgaagtaagcgcccagactgaagaacaccccggaaatcgccagcaggctaataatcaggtacagcagtgcgtgtaccggattggtatgggtgatcactcgcaaggtcgcaagtatggctatcaggccacagatataaaaagcgaactccattgcccctctccttacggtaacaggctcttgacgtcgataggcttggcttcgttctctgcttcgcccttatctttgccgtcgattgccatacctgccatccggtagaagttatattccgggtatttgcccggaccggagatcagcagatcctctttctcgtaaaccagatcctggcgcttgtattcccccatttcgaaatccggggttaactgaatcgccgtggtcggacaggcttcttcgcacagaccacagaaaatgcagcgactgaagttgatgcggaaaaattccgggtaccagcgaccgtctttggtttctgctttttgcaggctgatacagccgaccgggcaggctaccgcgcagaggttacaggctacgcaacgctcttcgccgtccgggtcgcgggtcagaacgatacgaccacgataacggggcggcagatagaccggctcttccgggtacattcgcgtttcgcgtttggcgaacgcgtgcaggccgatcatccagatactacgaacctgggtgccgaaacctactaacaattcttttaaggtcatggtcttattgccccttattgcgcctgccagagaatgacagccgccgttaccagcaagttgatcagcgtcagcggcaggcagattttccagccgaaggacattacctggtcataacgcggacgcggtaagctcgcacgaatcaaaatgaacatcatcataaagaacgcggttttcagcgcgaaccagatgaatggcggtaacaacgggccttgccagccaccgaagaacagcgtcaccatcaatgcagagatggtcacaatcccgatgtactcacccacgaagaacagaccgaacttcataccggaatattcaatgtggtaaccatccgccagttcctgctcggcttccggctggtcaaacgggtgacggtgacataccgccacgcccgcgatggcaaaggtaataaaaccaaagaattgcgggataacgttccacacatgcgcctggctgttgacgatgtcggtcatgttgaaactaccggcctgcgccaccacgcccatcaaggaaagcccgaggaacacttcgtagctcagggtctgcgcagaagcacgcatcgcacccagcaagctgtatttgttgttactactccagcccgcaaacagcaccgcgtaaaccgccagacctgccatcatcaggaagaacaaaatcccgatgttcaggtcggcaaccacccaacccggactgactggcacaatcgcaaaggccagcagcaggctggtaaaggcaatcatcggtgccagggtaaagatgacgcgatcgctgaatttcgggatccagtcttctttaaagaacattttgatcatgtccgcaaccagctggaggctaccgccccagccaacacggttaggtccgtaacggttctggaacagacccagcaggcgacgttcgccaaagctcatgaatgccccgcaggtgacaaccaccagcaggatcaccaccgctttgaggatggtcagcaggatctcaatcagttccggacttatccaactcattgttgtgcctccttgagatcctcaagatgcgcgccagccagcaccggagcaatgccggacatacccatcggcaagcccacctgccctgccgtcagtccttcggcgatttcaaccggcagcgtgaccgtgttgccatcgtaactaaaggagacgcgtgtacctgcgttcacacccaacttcgcggcatccgctgggttgagtttgatgtacggctgcggcatacggctctggaagaccggagcacgctgactcaattcatcgctgccaaacaggtggtaatacggcgcgatacgccatttcccgtcctgcggctggaagcgtgccggtacgctggtgaagtaatccagaccattttcgctggtttcaaacagacgcacgcccggatcgccaaagcgcagtttgccgcccacttcgtcctggaatttgttccacgcctgcggggagttccagcccggcgcccaggcaaacggcacttggctacggtgcgcagtcggctggttgttaccttccatgctgaaggtgaacatggtgtcaatatcctgcggctgacgcggctcatgaacgctgatattggcgcgcatggcggtacgaccgctgtaacggtgcggttcacgggccagtttctgcccacgaatacggaatgtcgcatccggcgcagcatctttgatacctgccagttccgggattttcgccacaacagcgtcaatcacatggtcgagctgcgtccagtccacttcacggctcagcagggtgctgtgcaggctgtgtaaccagcgccagctttccagcatgacagttttgctgtcgtaataagcaggatcgtaaacctggaagaaacgttgggcgcggccttcgttgttgatcaccgtaccgtcgctttcagcaaagctggcagcagaaagtaccagatgggcgttttccataatcgctgtgcgttgatgatcaaccaccatcaccagcggtgctttagccagcgcagcattcacgcggatagcagaagcgtgacgatgcagatcgttttccaacaccaccaccgcgtcggcgcgtccggtttccagttcggttaacgcttcttcaaggctaccgccacccataatgcccagccccatgctgttgacggaacgggcaatcatggtgataccgacgtcagcgccgcgacctttcagggctttcgcgacgttagccgccgcctgaatcacctctaagctaccggcgttcgtcccggagataatcaacggtttcttcgcacctgccagtgcctgcacgatgacgtcgattttgctttgcagctcaggttcgataccgtcaaccgctggtgcagagttatccagcgcatgggcgatggcaaaacctaaacgcgcctgatcttcaaccggtgcgcggtaagtccacgccgcgatatcatccagacgggtgtcatcaacgttggtaacaaacagcggatgcttcgcacgttgaccgatgttgaggattgccgcaatctgccagtcagccactttctgtgctgccgccatttcgcgcgctttacctttcacagcctgacgcactgccagcgcgacgcgcgcgccggtctgggtaacgtcttcgcccagcaccagtaccgcatcgtaagattcgatttcgcgcagagccggagtataaatgccgccttcacgcagcactttcagcgccagttgcagacgttcctgctcaccgtgagcgataccggtgtagaagttttcttcgcccaccagttcacgcagcgcaaagttgctttccacgctggcacgcggagaaccaataccgatcactttcttgctctgacgcagaatatctgccgcgccctgcattgcctgttcggcgttgagggtaatgaaatcatcgccacgacgctgtactggctgacgcggacgatccttcaggttgacgtaaccgtaaccgaaacgaccacggtcgcagaggaagtagtggtttaccgtaccgttgtaacggttttcgatacgacgcagttcgccgtaacgttcaccggggctgatgttacagccgatggaacattgctggcagatgctcggcgcaaactgcatatcccatttacggttgtaacgctcggagtgcgttttgtcggtaaatacgccggtcgggcaaatttcgaccaggttaccggaaaattcgctttccagcgtgccgtcttccgggcgaccgaagtagacgttgtcgtgcgcaccgtaaacgcccagatctgtaccgtcagcgtaatctttgtagtaacgcacacagcggtagcaggcgatgcagcggttcatttcgtgagagatgaatggccccaaatcctgattacggtgggtacgtttggtgaaacggtagcgacggaagctgtgtccggtcatcacaatcatatcctgaagatggcagttaccgccctcttcacataccggacagtcgtgcgggtggttggtcatcaaccactcgaccacgctttcacggaactgtttcgcttcttcgtcgtcaatggaaataaaggtgccatcggaagccggtgtcatacaagacatcaccaggcgaccacgcgtgtcttccgcgttttggtattgcttcaccgcacactggcggcaagcaccgacacttcccagcgccggatgccagcaaaagtaaggaatatcaaggcccagagacagacaagcttccagcaggttgtccgctccgttgacctcgtattctttgccgtctacatgaattgtagccattagcatgcttccagttttctcagtcagagactgagcgttaatcgaaattcggttaccagcgctctttcagcaggttcggctgaatcccattaatcaaatgggtattgctgaacggctgtttgattcccgcctcaaattcttcgcggaaatatttgatggcgctctgtaacggctccactgcaccaggtgcgtgggcacagaaagttttacccgggcctaagaatcgacacagttgctcaagtgtttcgatatcgcccggctgaccttcaccacgctccagcgcacgcagaattttcacgctccacggcagaccgtcgcggcacggcgtacaccagccgcaggactcacgggcgaaaaactcttccaggttacgcaccaggctcaccatgttgatctcatggtcaaccgccatcgccagcgccgtacccagacggctgcccgctttaccgatactttcgaattccatcggcagatcaaggtgcgcttcggtcaggaagtcagtccccgcgccgcctggctgccaggctttaaatttcagaccatcacgcataccaccggcgtaatcttcgaggatctcgcgtgcggtggtgccgaacggcagttcccacagtcccggatttttcacccgaccggagaagcccatcagcttggtgccagcatctttacttttgctgatgttctgataccactccacgccgttagcgaggatcgccggaacgttacacagggtttcgacgttgttgacacaggtcggtttaccccatgcgccggaggttgccgggaagggtggcttgctgcgtgggttagcacgacgtccttccagggagttgattaacgctgtttcttccccgcagatgtagcgccctgccccggtatggacgaacagttcgaaatcgaaacctgttcccataatgtttttgccaagcagacccgcttcggtggcttcggcaatggcacggcgcagattaactgccgcttcgatatattcgccacgcaggaagatgtagccacggtaagctttcagcgcaaacgcggagatgagcataccttccaccagcaggtgcggcagttgctccatcaacaggcggtctttataggtgcccggctccatttcatcggcattacacagcaggtaacggatgttcatggattcgtctttcggcatcaggctccatttcaggccagtgctgaagcccgcgccgccgcgccctttcagaccagcgtcttttacctgattaacgatttcgtccggagacagcccggtcagcgccttacgcgcgccttcgtaaccgtttttgctgcggtattcgtccagccacactggctgtttgtcatcgcgcagacgccaggtcagcggatgcgtttcgggagtacggataatgtttttcatttataccgctccagcagttcagggatcgcttccggggtcagatgcgcgtgagtgtcctcatcgatcatcatgtttggccctttatcacagttccccaggcagcaagttggcagcagcgtaaagcggccatcaaatgtcgtttgccctggtttgatgttcagctttttctcgagcgccgcctgaataccctgataaccgttgatatgacagaccacgctgtcacaataacggatcacatggcgaccaaccggctggcggaagatctgactgtagaacgttgccacaccttcgacgtcgcttgccggaatacccagcacatcggcgatcgtgtggatcgcaccatccggcacccagccacgctgcttctgaacgattttcagcgcttcaatggacgccgcacgcgggtcttcgtagtggtgcatctcgtgctcgatcgcttcacgctctgccgcactcagctcaaaagcctcggtttgtggttgttgattctcgtgcataattagcggtccacatcactcataacaaaatcgatactgcccagataaacaatcaggtcagacaccaggctgccgcggatcgccgccggaatttgctgcaaatgcgcaaagctcggggtacgaacacgggtgcggtaactcatggtgctgccgtcgctggtcaggtagtaactgttgatccctttggtcgcctcaatcatctggaaagattcattggcaggcatcaccggaccccagctcacttgcaggaagtgggtgatcagggtttcgatatgttgcagcgtgcgctctttcggcggcggcgtggtcagcgggtgatccgctttgaacgggccttccggcatgttgttgaggcactgctcaagaatgcgcagactctggcgcagctcttccactttaagcattacgcgggtgtagcagtcagaaacgccaccacccaccgggatttcaaagtcgaagttttcatagccagaataaggacgcgccttacgcacgtcgaagtcgatcccggtagcacgcaggcccgcgccagtggtgccccactccagcgcctctttcgcgccataggcggcaacgccctgggaacgacctttcagaatggtgttttgcagcgccgctttctcgtaagacgccagacgtttcggcatccagtcgaggaactcacgcagcaggcgatcccagccgcgcggcaggtcgtgcgctacgccgccaatacggaaccacgccgggtgcatacggaaaccagtgattgcttccaccagatcgtaaattttctgacgatcggtaaaggcgaagaacactggcgtcattgcgccgacgtcctgaataaaggtgctgatatacagcaggtgactgttgatgcggaacagttcggagagcataacgcgaatgacgttaacgcgatccggcacggtgatcccggccagtttctctaccgccagcacgtaaggcatttcgttaacgcagccgccgaggtattcgatacggtcagtatacggaatgtagctgtgccaggactggcgttcgcccattttctccgcaccacggtggtggtaaccgatgtctggtacgcagtcgacaatctcttcgccatcgagttgcaaaacgatacggaaagccccgtgcgcgctcgggtggttcggaccgaggttgaggaacatgaagtcctcgttttcggtgccgcgcttcatcccccactcttccggtttgaaggtcagggcttccatctccagatcctgtttggctttggtcagctcaaacgggctgaattcggtagcgcgcgccggataatctttacgcagcgggtgacctttccaggtttgcggcatcatgatgcgtcgcaggttcgggtgaccgtcgaaagtaatgccaaacagatcccaggtttcacgctcataccagttagcgttcgggaacagtttggtgaaggtcggtacgtgcaggtcgttttctgccagcgccaccttcagcatgatgtcgcggttacgatcgatagaaatcagatggtagaaaacggaaaaatccgcggcaggtaacccttcgcggtgtgtgcgcagacgttcgtccatgccgtgtaagtcaaacagcatgacgtaaggtttcggcagtttctttaagaaatcgccaacttccagtaattgttcacgcttgatccacacaacgggaaccccggtgcgagtcgcctgaacagtaaaggcatccggcccaaaacggttgcgcagttcgccaatcaccggatcatcaagatgatcgcgggtctgccaggcgggttcttgcgcggttaagtcggtcatattgttcaccattgcaaatggtccgtggtgactgtcggcgcagtaagcttcgcgaaatagatttaggaataagcgaagaaaaatccctttgccgacaggcgcaaattaaatctcgtcaggtgtacgcaggttagttacggcaatgcgttcaccgcgcttgcgttcgcgctcactttgcatattggcgcgataaacgccctgatcgccaaccacccaggagagcggacgacgttctttgccgatagattcctgcaacagcatcagtgcctgcatgtacgcttcaggacgcggcgggcagcccgggatatacacatcaaccgggatgaatttatcgacgccctgcacaacggaataaatatcgtacataccaccagagttggcacaggcacccatactgataacccattttggttccagcatctggtcatacagacgctgaataaccggtgccattttggtaaagcaggttcctgcaaccaccatcaggtcagcctgacgcgggctagcacgcaatacttctgcgccaaaacgcgccacgtcatgcaccgcggtaaagctagtcaccatctcaacgtaacagcaggaaagaccgaagttatacggccaaatactgtttttacgaccccagttaaccatgtcattgagcttgcccataaacacgtttttgttaacttcttgctccagagggtcggttacgatctcctgcttttgcagggggtaacggtcgttctcaccgttgggatctatgcgggtgagcgtataatccatcttaatgcctcgcggttagcgttgacgattagcgatactgttcgtttccgggttcatacgctcgcggcgactacgcgcgggcgtccagtccagcgcgccaatacgcaccagataaaccagacctgccagtaacacaaaaataaaaattgcagcttccacaaagcctacccagccgctttcgcggatagaggtactccatgcgaacagatacagcgcttcaacgtcgaagataacgaagaacatggccaccagataaaacttggcggacaggcgtaagcgggcggagccgacgctgtcgataccggattcaaacggcacgtttttgctcctcgcgcgtgcgcgaccgcctaaaaaccaaccgcctaccagcatcaggcaacacaggccaatggcaacgataagaaagatagcgaatgcccagtgatgagcgatgacttcagtggatgtactcatactcattgcttactcatcaaaagtagcgccagattcactgctcttcacggcagatggacgccacatcgattcatggggaggaataaaaaaaaccttacaatcactgtagaaattcttttatacagctaattgatgtggttttttactcctttctataaccttttgtcaactttaacaaaagtttcttcacattagtttacataatatcaacaccattagcatttaatgccctttcaccccagatccttgacgactccaggataattagatgttgttgaatcgtgtccgttgtgaagcaatggaaaaaatacgggtctattttgacaggaatttgtgtcgattcctccccccaaaagagagtattttcttgatctgtgacacgcttttgtcattccataacaaaaacgcagcaacaaatttacgtattttttaacatcattgtagcaggtgatttttttcaggcgattatttgtgcgttcgggacgtgaatctctggtggttgaaaaatgaacagttttgtacgttctgcactatgcgatgaaggatttttactaaaaaaaagccgctggggtttaaaacacccccagcggctcgttttttacactattgtctcaggaattatctatcgtccgtcgattactcgatatccctttcaatcaacaaactatcatccccttccggagcagacattgggctgtattgccacggattatggtagctctccatcgcctgatagatcacctgggccagctcattattactggacggatcatagcacagcaaatattcggtatcaggtagcggcggtaagccatctactccactcagcacacgcaggtccgggctcatcatctcaaccggccttgccgtcacgccaagaccggctttcactgccgcacgaacggccggaagcgtgctggcgacataagccagtcgccatggaatatctgctttattaagcgtcgccagcaccatatcgcgaaacgggctaggatcatccagcaatacaagagggatcggctcgcctttttgcaatatgtattccgctgcgcagtaccagtgtgttgggctggtacgcaggttcaatgccttaaacgcactaggacgatgggtggttaccatcaaatccacttcctgggattccagcatttctgccatataggcattacgtttaacgcggacatccagcgctaatttcggataaacgctactcacgcgatttaacaggaaaggtaagatcgtatcggcagattcatcactagcaccgatagttaatacgccctgaagattactgaacattaaactactgcaggcctcatcattaaaacgcaggattttcctggcgtaaccaagaagttgaatgccatgttcagttaacagtttgttgcgaccgtgacgagcgaacagttctttcccaacgagttgttccagacgctgcatttgctgacttacggcggactgagtacgacacacagcggcagctgcggcagcaaaagtgttcagatcggcaacagcaacaaatgttctcagcagatcgaggtcgaggttaattatcggacgatttgcacttatcatatattatcacttactggcggctcatactgagctggttaatgctgtgcacacacaaacaagcaattccatttgtaatgtgcctccctggcagtttcatccggaacccggacgaaagtaaaaatgcatatgagttgcactaaaaaagcgactcacattgttccgttataatgcctgaagtagatcacagaatatatcttcagggatcgcatatctattaagttactcactcttttctatttatgacatgcgcgtgtttgtataaatgtaaatgtgagtccttgttccactctcgtgcagcatcgctggtcatacgcgaacacgtaccaacagcaatggtgaggcggcatcaagagcagggatccgtcatttatccgagcattttaccccaaaaaccttttatttataagggtcattgcgaattatctgatgcaaagttatgttatgttaggcaaagtaatcttctattattaataagcacatcaaaacctttttgaatattaaataataattaattagcatcatcctcattcattaattccgcttaacaatagtttcacaccttgcccccattgcgacacctcggaaatcatcacgcagttaaactctccgtaatgaggaaatatcatcatcgcgtttcattagtgaattcttaaatgaggcattttcacacaattatcttacagataaaaaaaccagacttacaattaagaatcagaacaattcactatataacattgcatgtaaagcatatacacctcattattttgtcattattaagttattaacagcacaatcgagccttcccctctggcaaaatcttattctgcagaccttcaaaacaccgtcctgggggagtacattgttctaagctgacttccacggcagggagtggcgataacagcaaaaaaggtcaagattcatgtcccccattgaaaaatccagcaaattagagaatgtctgttatgacatccgtggtccggtgctgaaagaagcaaaacgcctggaagaagaaggtaacaaggtactgaaactgaacatcggcaacccagccccgttcggttttgacgcgccagatgaaatcctcgttgacgtgatacgcaacctgcctaccgctcaagggtattgcgattccaaaggtctttactccgcgcgtaaagccatcatgcagcactaccaggctcgtggcatgcgtgatgttaccgtggaagatatttacatcggcaatggtgtaagcgagcttatcgttcaggcaatgcaggcattgctgaacagcggggacgaaatgttggttcctgcaccagattacccactctggaccgcggcggttagcctttccagcggtaaagcggtgcattatctttgcgatgaatcctctgactggttcccggacctcgatgatattcgcgctaaaattacgcctcgtacgcgtgggatcgttattatcaacccaaataacccaaccggcgcggtatattccaaagagcttttaatggagattgtggagattgcacgtcagcataatctcattatcttcgccgatgaaatttatgacaaaattctctacgacgacgctgagcatcacagtattgcgccgctggcacctgacctgctgaccattacctttaacggactgagcaaaacgtaccgcgttgcaggcttccgtcaggggtggatggtgttgaacgggccgaaaaaacacgccaaaggctacatcgaaggtctggaaatgctggctagtatgcgcctgtgtgctaacgttcctgcgcaacacgccattcagaccgcgctaggtggttatcagagcatcagtgaatttattacccctggcggtcgtctttatgagcagcgtaaccgcgcgtgggaactgatcaacgatattccgggcgtttcctgcgtgaaacctcgtggtgcgctgtatatgttcccgaaaatcgacgccaaacgctttaacattcacgacgatcagaaaatggtgttggatttcctgttgcaggaaaaagttctgttggtgcaagggacggcattcaactggccgtggccggatcacttccgcattgtcacgctaccgcgtgtcgatgatatcgagctgtctttgagcaagttcgcgcgtttcctttctggttatcatcagctgtaatcttaatttcactgccggagattgcatccggcagcgttatcccgccacaatgacctgatgatgtcatcatacgtaaggtcactatgaaacagagccatttttttgcccatctctcccgcctgaaactcattaaccgctggccgctcatgcgcaacgtgcggacggaaaatgtgtccgaacacagtttgcaggtagcgatggtcgcccatgcgctggcagctatcaaaaatcgaaaatttggcggtaatgtcaacgccgaacgtatcgctttactggcgatgtaccacgatgccagtgaagtgctcaccggcgatctccctactccggtgaaatacttcaatagccaaatcgctcaggagtacaaggctattgaaaaaatcgctcagcaaaaactggtcgatatggttccggaagagctgcgggatatctttgcgccgttaattgacgagcatgcatatagcgatgaagaaaaaagcctggtgaaacaggcagatgcactgtgtgcatatctgaaatgtctggaagaactcgcggccggaaataatgaattcttgctggcaaaaacgcgactggaagcgacgcttgaagcgcgtcgcagccaggagatggactacttcatggaaatatttgttcccagcttccatcttagcctcgatgagattagccaggatagtccgctgtaagcagccggagtctgcgtcgcatcaggcaataagcgccggatgcgacatcaggctcttgtcaaaacggaaacagcatcgggatcatcaccacacaaaccgccatcacgataatggtgaacggtacccccaacttcacaaagtcactgaagctgtaatttcccggacctaaaaccagtgtgttaacaggactagaaaccggtgtcataaaggcggcggatgctgccatcgccacgaccatcgcgaatggataagggctcacccccatcgttttggcagcagccagcgcaatcggagccatcaacaccgccgtcgcggtattagagataaatagcccaataaccgcgctcaagacaaacaaacaccccagcatcatatgtggcccgtaaccaccgccaatgtccatcagccctttcaccgccagcgcgacacctcccgttttctgtaatgccacagcaaacggcatcatcccaacgatcaaaataatgctcggccagtgaatggatttataggcgctttcagcatctatacagcggaatttccccatcagcaggcaggcgatgatagcggcaacaggattaggaatttcatctgtcagcattaacgccaccattagcaccagacagaaaatggcatggggtgcctggctgtgcgcgggacttgcttcactcacctcttccggtaagttcagcgctacgaagtcgcggccctgtttggccagcataccgatcagtttccagttacccacaaccaggatgatatcgcccagcagcagaggctcatccgccaggctaccttccagcgccacgccattgcgctttagccccaccacattcagtccgtagcgggtacgaaaaccaatttcgcgcacgcttttaccaatcagttcactctcaggaattaaactaatctctgccatgcccacatcaagggcctggtcagaaaatactcgccgcgcagtaccatcggctccagcaattgctcactacaaaattgccggagatcgacatcagccgcagacatatcaataagcaaaacgtcacgcgcgcgaaattcagaaaccccattaacgttcacgataacgcgacgaaaacgccgccagcgttcaacaccgatgacgttagcgccataacgctcacgtaatttgagatcatccagccgttgaccaatcattgggcttccggggcgaatagccagacgtcgcgcacgcccggtcagtcgatattcacggataagatcgcgaaaggttcgacgcgtccagccttcgcgctgcggggtctgggtatcccctttcagcatgaaacgcatcactaacatatacaaaatacccagcaccagcacgaccaggccaataggtgttacgctaaagaaactgaagccgtgatagccttcacgcagcaattcactgttgactaccaggttcggcggcgtcgccaccagcgtcatcatgccgctaatcagcccggcaaaacttaacggcatcatcagacgactcgggctcgtttgcatacgcatggcaacgcttaacaccacgggaataaagatagcgacaacgccggtactactcataaacgcgccaagccccgcgacggtcagcatcaacaaaaccaacattttgatttcactattgcccgcaactttgaccagccatgttcccattacggtggcaacaccggtacggaccaaaccatcgccaataataaacaaggcggcaatcaggacaacgttaggatcagaaaagccggaaaatacttctgggactgtcagcgttccgcttaatgcaaacgcgacaataacaaacaaagcgaccgcatccatacgcactctgcccgtcgcaaacaagacgatggcaacggccagtaaactaagaacccaaatcaattcaccgttcacaacttatccttgttaattgagggggatgacttgattctgccataaaaaagccccgacgagacggggctaaatcatgatcaggtgtttcactgaataataacatcgccatttggctgtttggtcacagtaatttgctccagactgtggaggaccaaatcgacctcattcaggcgcggggtatctgccggagcgttaaccgcaatgacatgacaacccgccgccaggccagaaagcacgccagcgggagcatcttccaccaccacacactcctgcggcgcaagccccagcagctgcgcgcctaacagatacgcatcaggttctggttttccgcgcttcactcgctcagcggttacaaacacctctggtgcgggaagcccagctattttatggcgcgctcgcgctaccggcatggagccagaagtcacaatggcccacggaatacctgctttattcaaatgactgagtaaggcgattgcccccggaagcgcggtaataccttcggtttccgtggcctcgatgtgctccagacgcgtaaactcggcggcaatatcagcctcggatttgcccgccataaaatggcgcagagaggtgatcgcctgtttaccgtgaatgaaagccagcacctcttccggcgctaacccatgacgtctggcccagttgctccacgcccgttctaccgcaggcagggaatccaccagcgttccatcaagatcaaacagaaaacctttgcaccgcacgcgggcctcctcaggcattgataatttgattaatttcgttggcgctcaaatggtactgacgcgggcaggcatgccacacattaagcatgcgctgatatttttcccacattggcgtctgggcgttaaaaccgtgagttccggcgtcaaaatgggtatagcgcccttccacattaaccataaagcggacataaccgaggtaacgtgcttcagtggcggcgtcaaagccgaggaaggtgacacgacgttcatcgatggattgctggtcctgcaaattagaccaggaaacatgcaacgcatgatacatctccataatgtcgatgatagtgcggcaggtttcttctttcagctcgccaaactcgcgatccaattcacgcatctgtaatccgtaaccacgctcaataattgtttgcaggcgacggtaacgttcagcatttgccggatcgagcatagtcatcatcttgtactgattagacaaaataagacgttgcgcgttggtcatttccattgttgactcctgtatcactctactacggtgaaaaaaaagaaggctgagtatgccttcttttatatgcgtaatcaggggtcaattacaaatcatcaaggaaagttttatccagttgtttgaaggcgcgcttaagcgtgtcagctaatgcctggtaatcaggcttgccttcaacgggtgccaacacctgtccagactcctgcaatttaccgcgaacttcataaaaccagttaaggattgcagggggtaatggcgtgacagaacgcttgcccagccaccacaatccctgcatgggtaaacttaaggcgaacagggcagtggcaactgccggcccaagctgaccgcccagggcaatctgccagcagagagtaaatacggcgatcggcggcataaaacggatcgcataacgcgtcatcttgataacgcgattttcgacaaagaccggggcaaggcgtttttccagcggccacgtcttactgtaatgctgtccccggcgaaacaagctaaaaaaattaacagaacgattatccggcgtactcatgcttcacctcaacttcacatataaagattcaaaaatttgtgcaaattcacaactcagcgggacaacgttcaaaacattttgtcttccatacccactatcaggtatcctttagcagcctgaaggcctaagtagtacatattcattgagtcgtcaaattcatatacattatgccattggctgaaaattacgcaaaatggcatagactcaagatatttcttccatcatgcaaaaaaaatttgcagtgcatgatgttaatcataaatgtcggtgtcatcatgcgctacgctctatggctccctgacgtttttttagccacgtatcaattataggtacttccatgagcagtaagttagtactggttctgaactgcggtagttctagtctgaaatttgccatcatcgatgcagtaaatggtgaagagtacctttctggtttagccgaatgtttccacctgcccgaagcacgtatcaaatggaaaatggacggcaataaacaggaagcggctttaggtgcaggcgccgctcacagcgaagcgctcaactttatcgttaatactattctggcacaaaaaccagaactgtctgcgcagctgactgctatcggtcaccgtatcgtacacggcggcgaaaagtataccagctccgtagtgatcgatgagtctgttattcagggtatcaaagatgcagcttcttttgcaccgctgcacaacccggctcacctgatcggtatcgaagaagctctgaaatctttcccacagctgaaagacaaaaacgttgctgtatttgacaccgcgttccaccagactatgccggaagagtcttacctctacgccctgccttacaacctgtacaaagagcacggcatccgtcgttacggcgcgcacggcaccagccacttctatgtaacccaggaagcggcaaaaatgctgaacaaaccggtagaagaactgaacatcatcacctgccacctgggcaacggtggttccgtttctgctatccgcaacggtaaatgcgttgacacctctatgggcctgaccccgctggaaggtctggtcatgggtacccgttctggtgatatcgatccggcgatcatcttccacctgcacgacaccctgggcatgagcgttgacgcaatcaacaaactgctgaccaaagagtctggcctgctgggtctgaccgaagtgaccagcgactgccgctatgttgaagacaactacgcgacgaaagaagacgcgaagcgcgcaatggacgtttactgccaccgcctggcgaaatacatcggtgcctacactgcgctgatggatggtcgtctggacgctgttgtattcactggtggtatcggtgaaaatgccgcaatggttcgtgaactgtctctgggcaaactgggcgtgctgggctttgaagttgatcatgaacgcaacctggctgcacgtttcggcaaatctggtttcatcaacaaagaaggtacccgtcctgcggtggttatcccaaccaacgaagaactggttatcgcgcaagacgcgagccgcctgactgcctgatttcacaccgccagctcagctggcggtgctgttttgtaacccgccaaatcggcggtaacgaaagaggataaaccgtgtcccgtattattatgctgatccctaccggaaccagcgtcggtctgaccagcgtcagccttggcgtgatccgtgcaatggaacgcaaaggcgttcgtctgagcgttttcaaacctatcgctcagccgcgtaccggtggcgatgcgcccgatcagactacgactatcgtgcgtgcgaactcttccaccacgacggccgctgaaccgctgaaaatgagctacgttgaaggtctgctttccagcaatcagaaagatgtgctgatggaagagatcgtcgcaaactaccacgctaacaccaaagacgctgaagtcgttctggttgaaggtctggtcccgacacgtaagcaccagtttgcccagtctctgaactacgaaatcgctaaaacgctgaatgcggaaatcgtcttcgttatgtctcagggcactgacaccccggaacagctgaaagagcgtatcgaactgacccgcaacagcttcggcggtgccaaaaacaccaacatcaccggcgttatcgttaacaaactgaacgcaccggttgatgaacagggtcgtactcgcccggatctgtccgagattttcgacgactcttccaaagctaaagtaaacaatgttgatccggcgaagctgcaagaatccagcccgctgccggttctcggcgctgtgccgtggagctttgacctgatcgcgactcgtgcgatcgatatggctcgccacctgaatgcgaccatcatcaacgaaggcgacatcaatactcgccgcgttaaatccgtcgctttctgcgcacgcagcattccgcacatgctggagcacttccgtgccggttctctgctggtgacttccgcagaccgtcctgacgtgctggtggccgcttgcctggcagccatgaacggcgtagaaatcggtgccctgctgctgactggcggttacgaaatggacgcgcgcatttctaaactgtgcgaacgtgctttcgctaccggcctgccggtatttatggtgaacaccaacacctggcagacctctctgagcctgcagagcttcaacctggaagttccggttgacgatcacgaacgtatcgagaaagttcaggaatacgttgctaactacatcaacgctgactggatcgaatctctgactgccacttctgagcgcagccgtcgtctgtctccgcctgcgttccgttatcagctgactgaacttgcgcgcaaagcgggcaaacgtatcgtactgccggaaggtgacgaaccgcgtaccgttaaagcagccgctatctgtgctgaacgtggtatcgcaacttgcgtactgctgggtaatccggcagagatcaaccgtgttgcagcgtctcagggtgtagaactgggtgcagggattgaaatcgttgatccagaagtggttcgcgaaagctatgttggtcgtctggtcgaactgcgtaagaacaaaggcatgaccgaaaccgttgcccgcgaacagctggaagacaacgtggtgctcggtacgctgatgctggaacaggatgaagttgatggtctggtttccggtgctgttcacactaccgcaaacaccatccgtccgccgctgcagctgatcaaaactgcaccgggcagctccctggtatcttccgtgttcttcatgctgctgccggaacaggtttacgtttacggtgactgtgcgatcaacccggatccgaccgctgaacagctggcagaaatcgcgattcagtccgctgattccgctgcggccttcggtatcgaaccgcgcgttgctatgctctcctactccaccggtacttctggtgcaggtagcgacgtagaaaaagttcgcgaagcaactcgtctggcgcaggaaaaacgtcctgacctgatgatcgacggtccgctgcagtacgacgctgcggtaatggctgacgttgcgaaatccaaagcgccgaactctccggttgcaggtcgcgctaccgtgttcatcttcccggatctgaacaccggtaacaccacctacaaagcggtacagcgttctgccgacctgatctccatcgggccgatgctgcagggtatgcgcaagccggttaacgacctgtcccgtggcgcactggttgacgatatcgtctacaccatcgcgctgactgcgattcagtctgcacagcagcagtaatctcgtcatcatccgcagctttgcgctgcggatatctgaaccggaaataatcactatttccggttttttattctcttaatttgcattaatcctttctgattatcttgcttaactgcgctgcatcaatgaattgcgccatcccactttgcatacttaccactttgttttgtgcaagggaatatttgcgctatgtccgcaatcactgaatccaaaccaacaagaagatgggcaatgcccgatacgttggtgattatcttttttgttgctattttaaccagccttgccacctgggtagttccggtggggatgtttgacagtcaggaagtgcagtatcaggttgatggtcaaacaaaaacacgcaaagtcgtagatccacacagttttcgcattctgactaacgaagcaggcgaacctgagtatcaccgcgtacagctgttcacgacgggcgatgaacgcccgggcctgatgaacttcccgtttgaaggattaaccagtggaagcaaatacgggacagccgttggcatcatcatgtttatgctggtgattggcggcgcgtttggcattgtgatgcgtacaggaaccattgataacggtatcctggcgcttattcgccatacccgcgggaatgaaattctctttattcctgcgctgtttattctgtttagtcttggcggcgcggtatttggtatgggagaagaggccgtcgcctttgccattatcatcgcaccgctaatggtccggctgggctatgacagtattaccaccgtcctggtgacctatattgccacgcaaatcggttttgccagtagctggatgaacccgttttgtgtggtcgttgctcaggggattgccggcgttccggtgctttctggctccgggttgcgtatcgtggtgtgggttatcgccactctgattggcctgatctttaccatggtgtacgccagtcgagtgaaaaagaatcctcttctgagtcgcgtgcatgagtccgaccgcttctttcgtgaaaagcaggctgatgttgaacaacgtccgtttacctttggtgactggctggtattgattgtcctgacc
